United States Patent Application Publication US 2025/0051766 A1 - sequence listing, part 27

SEQ ID NO: 5065 - DNA, 58617616 bp, Homo sapiens (residues 54,275,576-56,446,598 of 58,617,616)
  source 1..58617616: mol_type = genomic DNA
gtgtctgcagctcccatggggagcctgatccacagtgagctccctgggaacactcactggttgaatgaatgaaggggagcccaggggaccggggtggttcatttattcctcatcctccagaggcctggggagcgctctaacaaccagacggccaaacagaggatgaggagcaggaaggggacccgggaggaggcccacgaggtcccaggacagcaggagagagtgaggtcacagcaggcgggaggcagcgtgctggacaaggaggggtccaccgtgacgatgctgagagccgggggaaggaggacagagaagtcctgctggattagatctggcaccaggaggcctttggtgcctgggacaggggcggggtctcacccgagtgtccatctccaccccatcttcaggctgtgtgtccttcacggcagcatctgctggggcagagcaaggggttcgtctcttgggaaggttccctgggacctctgagtcctgccagcccctgccctgctcccagatggggctactgagatgcagggaggggctgcaatgtccctgaggtcccacagtgtggggtgagatgatctcaccctgagccccagaccctttccagccggtgcccctttccccattgctacggaaacttcggggcccctatctccctcctggctggtcacctcttcctctcactcacagaggttttcttcctgggcgtcggcagctgggctggacctgggggaggaatgggagctttaggggcagtgtatgggccacgagcaggtgggagtctggggtcttcgggcagaattacctccactgcaggcctctgtctgtgggctctggccccacagcccctgcaggatgttggaaatcagcctttctctgggctgggggaagaaggacagagcctcagccctgggaacattggagccccctgccctgcacacacagctcgaaggtaaggaaggaaacctaaaaacactcctgcctccatgttccaaatgcctcatgagatggacagagtccgaaggacactttacatttgtagatgggactgagcccggaggacactttatatttgtagatgggactgacgttaagtgctttctccattcacctggtgagaaatgctggaacagtttctcaaagctgcatttgcccagtggtttggattctctttggctgtgccctgagcccaccctcggtcggcccacagggtttccccttccctactcactcgatgtccagtgtttgccctgacgtcgatgtcggaggatgaggaagaggaggaggaggaggaggagcagtaggacgacggccaccaagatgccgatcacaacccccaggtgccttcccagaccttgagcacgatgatgtcagggatgggggtgatgtcattgaaatgagcgcctactgtgtgcaggtgactgctggaccttctgttcaccacctccaacccccacaacagtcgtgcagcacacaaacatccaccccacccactctacagatgaaaaactgacgctcagagaggggaatcgcctgccccgggcccccagccaggaagcggcagagctgggaagggagcctgggagtctgacctgcagcccttgttcctgcaccagagccgagccccggagctgcagggaaagagccttaccgtcctgaaccacgactctgctcccctcccctgccccaggtcaccgtctctgctgcaggtgggacgggacaggcccccgcggaatcgagtcttggagtcttccctgaggggcctcctctcccaggaggtcacagctgggagtgagagctgaaaggaactttcccacctgcaggcctctctcctttacacttggagaaactgaggcccaggcaggggaggagcctgtctacatcaccacctccagaggagcctgaacctaggacagaacccacccctgcctccccgggaccccgcccacctcccactcagagcccctcactcaccactttggggatccgacccagtgggggtgaggggctggtcctcagggcctgctgggtcaggacggggaggtgagggctggggctgccctgctccccacatcagcccggctgctcctcccccaggctgggccccaacatttctctctgccttgaccccccacccctcaccagcccagcctcagagccctggggaccctgtggcccctcctctggctctgcccagctccctggacagaagcccttgattgagtccctgaagggaatgggatcctcctggacactcaaagctgccctgggggtcgctgcgctcccttcgagccagaggcctcagggactcaccaggtgtggagatgggaccggtgggtggggggctggaacccatggagggtcctgggtgaaagaatgagaggagggtgaggagctggggctttcctgaagtctccacctcaaaccaaatttctctacatgggccctgtggcctccccaggcccctccctccacccgcctctcctgtccatgatgctggcgatgccgctgagtgtgcgcaggcctgggagggcctgttgtcctccttccctctgagggtgagtctcccactggctgagccccgctcagacccccgctcactccatcccagcccagagctctcctggggggcagggcctgagctgagcctttgagctcagagaggacagggtcaaggcccccacctgagaccacgagctccaggggctcactggggtgagacagcaggtaggggtcggagttgagtgagccgtagcacctgtaggtccccgcgtgggctgaggtcacaggactcatggggaattcagcctggtacttaggatattcgtgtattgatcttagacggagtggggcatcagctgctcccgccttggtcagaaggaaagtgtggaactgccgccatgactgacacagcagggtcacgttctctcctgaggccactgtggggcctggctgcactgagatgaagggtgtgccacggatctgtcctggagagaagaaggatgggtgaggggctgccccaccttgctctgagctgagacctccccaggcctctctaggagcctctgtctctgttttctctgagtcttcccctccccacccatcccctgtctctctctctgtctctccctcccttgggaccaccccccgcctcatcctggccatcactaattggattcccccggcagggcctgtgcagagtctgggtccctgactgaacccgctgggctcctcacctgtgatcaggatgtccagggggtcgctgggggccgagcactcagaggagaggttgtgtgcaccgtagcatctgtactggcccccgtaggagcggctcacagggcccagggtgaagttggcctgggagagcccagcctggggctgccggccagggagctggcgaaggtcacgttccccctccttgtacagaacaaatctgtcatagccgacatcagagacacactggagggtcaggctttccccaggggccatgacaggacccggctgcactgagagtgatggcttcttagaaacacctgggaaaaggtgctcatggtttccaggagccgaccctcaggcttccccacaaaccctccctctcccccggtgcctcaccactgctgatcttcctgtgtctctggccccaggacccctgagccctctcgccccaacatcatcccacctggaactgccctgagacacggctgctccccacctgcctggagactcagggagactcagggaactccagacaatgctgtgaatttctcacctgggaccaggagctccaggagatcactgggtgaagaccacacatagggagagttcaagtcataaccatagcacctgtgcgaccacctgcgattcgggctcacggggcccacggagaagatggcgcgggacgacccacgggcatggggctgggagttcaggcattgtgggtgttcatcttctccttccttacacagaatgaagccgccaaatgccacctgtgactcacactggagggtcacccttcctcctgaggtcaccacagggctgggctgggctgagagggtgggttttgggtaggctcctaggagagaaggaggcatcgtgttaaatggggctcccacctcccacatcatccccagggctgggctgtgagagggagacacccctgagagcctccttcctgagggcagagcctggggctgggatccctgagtgtcctctcacctgtcatcaccagcaccagggggtcactgagctcagaccaccgagcgcggctgtaatactgacagccatatcgccctgtgtgttcccaggtgatggatgggatgtggaactggccgttcttcacaagctctggtcgtatccgtgtaatccaagatgctgattttttctccctatatagacggtactcctgggcttcaaggctcccctgacaactgagggtgacgggactcccctgggtgatcacagagtctggctcagcccacagggtgggcttggggatggtccctggaaggaaatcaaaggtcagattcgaagtcatttcccacccaacagatctcagctctcagcccaggaccctccagatgcccccatcagtcagtccagaacttctaatccccatccccagctgcacggaggtggccccttgtccccagtgaggaggagggacctgggagagctggggacagactcacctgtctgcacgcgggtcctggggcccagactcagccctggaagagagttccctgtgagggatttgccccctgaagcctgagcaggtcctcccctccctgggatctttgtgagcccctggggtctccttagggaccagagtttggctgtggggtgaggtccctcctaggttagaagctcccctctctcttcaaatctcaccgagacagatcaggactgtgacgatgggggtcatggcgtctcctcccactgccctgctctgcggatggatgagccctcggtgctggcgggacagagacacacagagagaaatagcctcccctccttcccaccctgtgtggacactcagaggctgggtccttctcatggggtgttgtcatctgcagccacacaagaagcggaactgccctcccaggagcctgactctcattcttttagagctgaggtgggggcaggcactgggccctctgcagacatttcagactgtaatggggtctttcctgacccccagccactgtctgtctggtttctcctcgtctcaccgagagccgggatgtagcagcaaatagaactggtgcttcttgtgtctgcccttcctgatgagggtagcagtggcttccccttccttctcacagcttcccacatggtcaccctccctccttcagcccatccatcagcacagcgttgtggggtccttaccatggcagtcgtccctccagccctggagatgcttcagggaagacccaggtccatgctgcaggcagactcagatcagcagagaagcatctcgcctctggctgtgctgtccaggttgagctgtgtgtggcagtgagcacagaggagaaatgcagggaagtaggggaagaaaagttgacttctttcttgacactggattgtgggttttctttcaaccaaatagtcccctcttaacttcccctttttaaatgtttttgctccagcgtccactccctcccccccgggaagaaacctctgagtctttcctgcctcctcggtgcccattgcgtccttagccgtccctctgcacctcaattcctggtcaacattttgggaacaatgacttatgtttgagctttgatttggggagtgggggagggagttgatatttatttgatgactggttatcatccgctgcctacgtgaccttggtttgtaatgtcccatcactgagcctcagtttcttcctttgcagattgttgtcatgaatcccactcgtcacagtggttgtggggtcagtggtgcctgggacattgggaggggctcatttgtgcttgatttccagaccagggtaagacctgaggctttgggacgtgagaggatcttgctgttggactccacattctgtaggtgattgatgagtccactcaagatgtcacatctgaccgtaatggagaaacgtatgtgtagcatttctgaaatacccagagtatcaaggtcatgagcagaaaaagacatgtggaaaccccaagtgtagacggactcacaagaaagaacagaggccagaggtgagatgccacagggtcccgggaccatcaagggctcattagggtggaggtttccaccactgagtggagccgggagaggaaccccgggatctgcaatgacagtgaggggctcagggctccagaccaaggtgggaggctgcgtcctctagctacacctgaggctggagtggaccccaagcagcccaggggaattccctcaagggagtgcaccaaactgtccagacctgctggaattccaaggaaagaagcactaaacaccagggtgttcatagagcatttattagggggacctctgcacagtggggcatccttgtcttcttgcccagtgtctccttgtggatctcaaggatgtgcttccacatagcagcatgttcttcagatggacaaggagacactgggtattctatccaaagctttaacctaaaataaaaacaaaaccaaaaataaacccctagaaaatatgatctctcagtacagttgtttcttgggatacacaggcaattcgtttcagtaccccctacatgtaccaacacttgctcgtactccagccctgacgttgtctctgctgggtctgcatataggaaaagtctgccgttcatatacgcaagtcttgtttctcacaaatgctatagttttgatccccgtttgtttggaaaaagtgtgcatataagagacccctggaattcaaggctgcattgctccagggttgcctggattttgagtttatttgggagtgagaagcaaggattacaatatggagtgcatggcatggcaagccacagtgtgtccagagagggaagtgtgatgttgtgatatatgctggttttcacccgcagttcctggcttgtaactcccatagcccttgttatagtcttttgttataacattggctgtgctgggcctcaggggaggcctctgacctcctcctgcccttccttcacctaacccaaagtaagactcgaatgttccctgcctttctgatagtggatcttaagaccctcccagaagacagtctcaccctgttccttgtgggaggaaatgctgatgtcatgaagctttcataaaagccccagaggactgggtttcatgagtttctgggtggctgagcatgctaaggctcctggagggcgacgcccagggagggtatggaagccccgggcctcttcccccatgcctcctcctatgagtttcttcatctgtgtcctctgcagtgtgctttgtattcaaccaggaaatgtcagtgtttcctgagttctgtgagctgctacagcaaattaatcaaacccaaagagtggggcatgggatccccaacttgaagccagtcagtcagaagttctggaggtctggacttgggaatggtgttgggggcagttttggggaatgggccttcaatctgtgggatccgggactgtctctgggtagacagcaccagagctgacttagaggacacccagctgctgttcgctactgcgtctggggaaaaaaaccccatacatctggtcctagaagtctttttctgtgttgatgattcctgtgacgtgagagtagaggaaaagcaccgtagagagagctctctgtacatagagaggtaaaggaagttcttatcagcaacaagggagagcctgacagagctgcctggaaacagagttccctggttccacaggttcaaagccagagttgctgtcagtccattggaggagatgctgttgctggtcaatggttctcttgagagcatcttatctgaattcctgacgtcctaaagaacatctagtgataaaccttgtcaaagcagaaggggctgaaggacatggaagagtttcttatgggttttttaaaagtccttagaaacagttcttatctgagacgtggaagcatgggcctcctctccttcaggccttcctggccctgtggggtctgagtttgaccaaagtcatctcatccttgcacctgtaacttttctattgggagtctgcagtgaagggatggggttacgaagtttaacctgagagtttcaggaatttggttcaggggagggcttgtttctacacttttagcaaaagggttaatttttcagtgttttctagaaacaacctaaagtgctttatcagtacttggggatgctcaagacctcagcttgggttccagcctgcaggtggaaacatgcatctgtccaacccacagaacagtcatggccctttgtctcactctcagaacaaggaaaaaagtggaggaaactgtgggaccttagagactgtgactccccctcttctgtgtttgtggacagaccctgggatgactcagtgacccgggctacactcagcactgagccaccttcccgggtgtgcatgacacagatgcgctttatcattgttggaccgggcatctctgaccctggagtgtgaggctcacatggaccccgccatgccgggcataacacagaggtgattctaagcttgggagcatggacaccgcagggcaggagcggctacagcaatgccctcatcagctttccttcctgagtcagcctggggagaaaccctatatggaagatcaggtgtgtgggagaaaaacccaccccagaggaataaaaatcaaagagtccgttagagaaaaaacaggcaattgtagaaatgaattaggaagctattgtgatgtgaaaatagtaaattatattaacacatttagaaataatttcatccagaacaagacacagctgaaatgataaacattgtattggtgtagaatatttactaaaatttttcattagtcatcagagaaaaactagaaatgaaaaaaatagaaaagataattaatgcacacaagaaatggaatgaaaagaggaaacagatatctctctttggatcacactttcagaatgaaggaaataaggagtatgttattcagtaaatacttgcaaagaaaatggttgacatttttatagaaatgaagaaagaacatgagtttaacgtgaacaaattcataaataacatcaatgtcttaactatgatagagtaaaagatacctagaatagatacaaagtaattttaaaactactggagaaaatgaaaattattgtccaatgaaagacaagcacattgggactggatttcccaagagtaaaaagtgcaagaaaatgactgggggctgaggttcaagttggctgaatggaaagggctggagtctgcctactcactaagaggacccaaaatagcgagtaaataccaacaggtcaagtggatcttccaagaggatgctggggttcacctgagaaacatgaggacatggagagaagagaagagaaaaggtgggagccaggagaggctcctaacacggggaaggggtgagtgagtgagagattcaccaacacggggaaggggtgagtgagtgagagattccccaacacggggaaggggtgagtgagtgagaggatccctaacacggggaaggtgtgagtgagtgagaggatccctaacacggggaaggggtgaatgagtgagagcctccctaacacagggaaggggtgagtgagtgaggggtccctggcatctacacctctgctgtgggcccttaggatcctgcccacaggagagcgcctgtcccctctgggcctccagaggcccacagtttgctcctggagactgtaccaaggccccactggagcccacgtggaatcccacaggcttctgatccctgagcagcctgggtccagctgccactgccttagcagggagggaggaggccaggcacctctgtgggccccagaataagtatgacagctggggcacaggagcagccaagctgagcaccacacagctgcccacctctgttgcttcctgcgaaatggggcttccttcctgctaatggggcttgccagctgcagggccccagtcacccgtcctgcccccacccgaacaccgtggccctggctcggtgccctctgaaagcccaatgctcagaggcccctgacaagccctttgcagtcactgccacctctgcctctgcccctgctgccccaggcccagggagggtgtggggaggcctggcactttcacgtgtccccagagcaaaaccgagtgacacttcttcaggagggaagtgtgagcgggccctgtgcctcacagctgccagtctccagtgccccagccgaggggcgctgccctccctagtgacaggcccacagcacagccaccctgcccccacctggacatttcagctgcagcccccagcccttctgagagcccagtccccacaggcctgtgatctgccgcaggctctaccacctgagccttctgcctgccccgcctgaaggttctgccggtgacctggggaccagcccatccctccccatcacagccagcatctgaaccccggagcagccgaaacccagtccagccccttcaggactcacacacgctgtccagccggccacctaggggcctgtgatccgggaactacctgccctttcctacctgctggcacctgaccactcaccccagggcctgaggtcgggcccacccagccagcaacaccaccacaactgacgtccactctcccatccagagaggcagaagccccacatcccacctacatgaagcagctaccgcgtcagacaacagacagccgctcagggtctgcactgggctgagggaggaggctctgccttggaaccacgcctgcagagagtggcaaggcaggtgtttcccactgccctcagccacactgtggcctggggagagacaagagtgtgtgtctgaactgagactcatgagccctggagcacgggtgtgatagggagacagacaacgttcctccctatgggactggaaacggtgtagctccttcactccccgcagagacctcagggcatttcactaggagctgctccagccatgtccatcaggactagtgcctgcactcatcactgggatatctgtgggcaagccgggggttccagctctgcccaggggtgttccctcgcccctgtggaacaggaagctcagggcacctgacactccacggtccagcccttcccctgaaacaagagtcagcacctcacaggaaacacaccaggtccacatccacctgcttgtgccgagcgtggctcttacccttaagcaccagctcctggcctgcaatctgagctgcacagcccaatgcaaaccctgctgcagaagctcccaaagccatgggaaaagccaaaagacccttcccaacatgctctacagtcaccctccctgcggggctgggggaaaatgtgcaaaagaaatcccatccaaacgaaaataaattcgaagagagtaagtggaggcctctccagatgagaaggaatcagtgtaaggattctgacgccgtgaaaaatctgaatattgtggcaccaccaaaggatcgcactggctcgctagtgatggatgctgaaaacaatggaaactctgaaaggacagataaagaatgagactgacacaaaaacattacaaagaatcaatgaaagaaaacgttggttttttgaaagtataaataaaattgagagatggctgactacactaaccaaaaaaaggagatttaaataagcacaatcagaaatgataaagttgacattacaaccaacaccacagagatacaaaagatcatcagagactactatgaacacctttatgcacataaactagaaaacctggagaaaatagatgaattcctagacacacacaacttcccaagattgcacaggcaaaaaatagaaactctaaacagaccgataacaaccaatgaaaaaggatcagtactaaaaatcttccagcaaaaaagtccaggaacagatggattcgcagttgaacttagctgtatgtacgaaggagggctggtaccaatcatactgaaagtattccaaaaatcaaggaagtgggattctttgccagctcattttacaaaatcagtatcatcctgatagcaaaatcagacaaggatccaacagaaaaataaaactacaggccaagaaatctgaggaacacagatgcaaaaatcctcaagaaaatactagcaaacggaatctaacagtgtatcaaaaacataattcatcatgatcaagttggcttgattccagggaagaaaggatggttcaatatatgcaagtcaataaaagtgactcatgacatgaactaagaacaaaaagcatatgatcatctctatagatgcagataaagctttcaagaaagtccaacatcgcttcgtgataaaatccctcaacaggctaggcatgaaagaaacataccgcaaaataccaacaccccctgcgtgacaaacccacagccaacatcaaattgaatggggagaagtgaaaacattttcccaggaaaatgagaatgggatcctccctagcccctggggtctcctactggaccagggcctatctgtggggcagggtccctctcatgctagaatctccctttcccctcgtcaaatctcagtgaagtggaccatggccatgggagtgacagtcatggcacagagaggcagggctctcctgtagcaggacgagccgcagacaaaactcctcagacaccggattaaagaaggaagaggtttttattcagctgggagcgtgggcagactcgcgtcttaagagccgaactccccgaaaaagaaattcttggcctttttaaaggcttataactttaaggggtccacgtgaaagggtcgtgatacatcaagcaagcgtgggaaacatgactgtggggggctatatgcatcagctaacagaacaaaaagttttacagtgcttttttcatgcagtgtctggaatttacagataacaccagtagtttaggtcaggggttgatgttattattattactttttttaactcctacggccgggtggtggtgccaaggttgtctggctatttatcttacttttgtatttttccaacttttggctttttctctcttcctgttttgtgaactaggcaaggtggggggaggagggcagcaggagtagtagtggtctccttccttactcccacttacaggattttcccaccagcatctccatgggtggtgagctgtcccggaccccgctggctcatgttttcccaggacttggcctttctcgaatgctttatctgcatcgcttgagattatcacatgctttttgttcttagtttatgtcgtgagtcacctttattgacttgcatatattgaaccatcctttgagacaggcaccaggctttctgctgatatttcagacacgcatggcatctctcctgatctcctttcactgtctgcctgacatgtcctcgtctcattgagggccgggacgtagctgcaaatggacgtggtgccttcctgagttggtcccttccaggtgaaggcaacggagggttcttccttcctctcagagactcctcgtggggtttccctctctccttcagctcacccataaacacacccttgtggggaacctaccatggccagtcttctcaccagtcctggggaagcttcagggaagatgcaaattcaggctgcggggcagactcacatcagcagagactcatctcgcatcttgctgtgcagttccagttgagctttattgtggcgatgaacagaaaagggaaatacatggagacaagggaaggaatcatgactctttccccagaactggagtgtgggttttctttatgcaaaaacgttcccttcacgaacttctcattcactcatcgcaacagcatctgcccccgtctccctggaaacaacattgacctgactctgccttcttggtgcccctgtcttctttcaaacactcctgttcccatcctgtgctcctgagttcaaggttctgggacaatacgtggggttagcactctgctttgaggggaaatcttgtctttatttaaatattcatgtgtcaccccctgcctgtgtgaccttgggcagtaacctcccatttctgagcctcggtttcctcatttggagcctgtgatgaaccccatttatcacaggggagctgggtcattggagcctggggactgcagggggctcagccatgggtaatttccagagcaggtgaagacaggaggggtgggggcatgaagggatgctggcgcccaccatcaaggcctgagattgatgtttccactaaggagagcccctttgttcctgcccttgagagatgcttctcataatatttcatcaacacccccgttatcacagtcatgtccagaaaatgagaaatgaaagcttgtcagaaggagaagcgcctgcattaaagagaaaattaaaactgacagagcatttgtgtctggtgccattggggtcttcagggaggaagtaattaagtcactagtgtgcatacatttaagcatgaaatgcaaatcttttttttttttttttcgagacagagtctcactctgtcgcccaggctggagtgcagtggcacaatctcagctcaccgcaacctccacctcccgcgttcaaacgattctcctgtctcagcctcccgagtagctggcactacaagcacgcaccaccacacccggctaatttttgtatttttagtaaagatggggcttcaccacgttggccaggctggtctcaaactcctgccctcacctgatccgcctgcctccgcctcccaaagtgctgggattacaggggtgggccaccgcgcctggccaaaatgcaaatcttgacctctcatgataaactgaaaaataggagtaaattaaaaaatacatatgctagactgaattatgtaatttaaaatgcatttttgtgttttgtgattttcaactcaacatgtcaatagcattgcttctcagtgggactggacttcccgatagtaaaaagataagggaaggagatgctaagagagtactctcaggggactaactgcaagtgaggaattctatacttactcaggttaatacctgaaaggtaaaggggtcagcaggggaccaattcctaaacagaagaaggctcagggcaagacggacctgtgaagctgtctggttgggcttccccttcgtgagggctgaggagggattggagggtggatctctcaaatcatcagatgtgctttctcttccaggtgttatacttaccctttaactaatacagaaatgttttcatctattttgatagagagagtgggaggaaaaagaaggcattttctgagctgcaagttactagatattactgttttcatgctcagtgaagg[187 bp omitted]tggtggtgggcgcctatagtcccagctactcgggaggctgaggcaggagaatggtgtgaacctgggaggcggagcttgcagtgagcgcagattgtgccactgcactccagcctgggcgacagagcaagactccgtctcaaaaaaaaaaaaaaaaaagaatcaatgaatccaaaatgtagaatatgagatgccacagtgatgtaagtgagaaacaggcaagtatttgaaaatcacacacagacatgcccacatgaatgcaaccacacacgggcacacatgtatgagtcagtgtgcatgtacacatgtgagtactcagagttcagctacagtggaattagaacgtgtcttctctaaaggcaaggataaatgaatcctcattcgaaaatatataattgagtgaatacttaactaaataggtgaagttattccaaatttttctttttttttaatcctgtatgtaaaagagtaattcatccactgaaggataagttaaatagcccagtaccccaatcacacctaggcatgaaacacaatagtaccatctaaaatgaaatgataatttacaatcagtaagtgaagaaaggtatactagtaaaatatctattggaaatattaatattcaacaaaatgtaacataatccaaaaagttttagaaataaaaactaaaattttgtgttttaatgaagttgtaagggctgggcatgaagggatttgcaggctgagcggggaggatcacttgagcccaggagttcaagaccagccagggcaaatagtgagactcatctttatttatttttttaaaaaaagaaggtattaaagatgactgggaaaaatcactgtatgaaaaaccgaggaagaaggaattagggctcccgaatggggtgaagacccacatgcagaatgtctctgagccctgagagtggagcagtgtgttcaggatcctgagcctgtggaaccaacattctctgagatgtgagtctatggaatgtgtgttataagacctgccttttgttagtataatccagcaaaagcccatgggcgaggacccagttttattttagggaatgtggggacagtatattttctatttgtgtttatgcaaatttcatattgctgatcagtcatgcagaaggcggaggtcagtgtgttcacaggattcgtacccgagagtctggagacacatgtgggggtccatgggaaaggctggtggccgggtatggtgggaaggtaatcagcgacagatgccagagtctcctgcttgatcttgccgaaatctggctcaaatgtttggcctggcacaaccaaactagaacttggaagacgctgtataggtaaaacataatattgtaatcattcatattctgttaaggctttgaaaatgtccttaataagatttctttatcctggaaggtagatggcaaatgataacatttctttattctagagggtagatggcaaacgataagatttctttattctagaggttagatggtgaatgatatgatttctttattctagagggtagatggtgaatgataacatttctctattctagagggtagatggtgaatgataagatgtctttattctagagggtaactggcgaacgataagatttctttactctagagggtagacggcaaatgataagatttgtttactctagagggtagatggtgaatgataagatttctttattctagagagtagattgtgaatatttggtccttcatgttttctcaggatcctccctccaaacattctatcctatacagcaaagctttacatccttcaaacacaacagtcgtcttggacctagatatgttgaactctttaatgctaggactcaagtcctcttgctgtttgggacaattcagaaaagaatcagccccagtcattttgcatacttctgtctgactgtcataggtgagtagaaagaaacagctcaactgcttgacaagattcatcgacctgaggtcttgtctgcagctggatttctatcctacttccgtgattttcctttcgtggatcaccaacacactgcaaatgcctatcattgcttttgacgtggtgtactttggttctgcctggaaaggcaggaagtctcgaagtgaggagctcacaggtcaaaggagattgaaatgttttcagacagaataggcaaatccgtagagacagaaagcacacttgtggttagcaggtgctggagggaagagggaatggggagtggctgctgaatgggtgtaggatgatgacaatgtgtggaacaggatggcagtgatggttacacagtgatctgaggagaagatacacaggtagcatctgagaaggagggaagggcttgtagggtttggagagggtgtcagggcatcagggtggatttatcttttcctggttgaaatctgatactctcccattgatttagttactgaagcacgtttggaactctgaactgaagagatggaggctcaataaagcacaccagggagtatggcaatgaggaataaagaagactgtgttacacaccatggaccagagcacacagatgtgcagaggtgtggatccagccctgccatgtgggatgtagcctcatgtctaggggtgggaaaagaaggggatccaaccaagggaagtcaacattaatagagaggaaaggtatcacatgttaatggtcctccatggatcaccctgcaaaatatctctgcaatccaacactgattcctccttctagaaattatcagcagacagtccagatagcattggccctaaattgtctcccggaacctcctgggatcaccatatctattcccaaggtttcaccactctgagagatgcattgtcctctctgctgttcacctcctagctgcatcttaggggcttctctggctgtgctgagcctcaaataacagaatcctgaggaccaccaggatcaagccagccttgcccatgtggatgagattctccactgtgtaatcctgggggtgtgaggttggggatggtgggcaaagagaccacagaggtcagggcagatcaacatcacccaggacctctggatgtccacccagggcacccacctccccttcacaggacctgaccctctgtgccagccccataactgaaagcatctcctcacgcaccagtcttggggtctgaattgttttgtgatgggctgagggtatcagctgctcctgagaatcaaagcaaaggagaagtaccctgagccagcctctcccatgggctcggcattcttatcttcccctgtctcctgacatgagttctaaggagttccttagtaaactcttcctctgtagcagtgttcgttccgttcttcttaatgaattatttcagctttcctgctttctacaaatccaaatgttgctcttgagtcatttgggggagagttttccttcaccctgagggctcaggatctgcaaggaaagtggtccccagtacagaggtcactgagccctgtgtgctgtctgtgcagcctgggacacgggagcacatgagccaattcccccggagatgagagtttcacggatccaccagctgaggacccaggctccctggatgaggggttggtcctcaggggctcccgaatgtcagaagcacaaagcggtgaaagtctggggctgcctccccttcacctgggttttcattgtccaattaatctaattaactaattcttcatataatcaggaaaacctagaatgatgtgataccttccccccggcccccatccaaaaatatctgtctgctaaatagtggtgctattagaggttcataaatcagtatttctgcttttacaaagtgtgaatctaggtgaatctagaccagtaacaaacatgtaaactcctaccacatcaaatgtcttatttatttatttattatttttattatttatttatttatttattgaggcagagtcttgctctgttgctcaggctggagtgcagtggtgtgatctcggctcactgcaagctccgtctcctgggttcaagcaattctcctgccccagcatcccgagtagctgggattacaggtgcacgccgccacgcccagctactttttttgtatctttagtagagatggcggtttcaccatgttggccaggctggtgtcgaactcctgacctcatgatcctcccacctcggcctcccaaagtgctgagattgtaggcatgagccactgtgcccggcctatttttatttttattgagatggagtctcactctgtcgcacaggttggagtgcagtggcactatctcggttcattgcaacctctgccgcccgggttcaagtgattcttgtgcttcagcctccctagtatctgggactacagggccgcaccaccatgcctggctaatttttttttgtatttttagtagagatgggcttttaccatgttggccaggctggtatcaaactcctgacctcaggtgatctgcccgccttggcctcccaaagtgctgggattacaggcatgagtcactgcgcctggccatcaaatatattaagaatatggatatatttatcaagtgaacttggaaatacttacacacatattcaaatgtaacttatataaccacacataaatatgtatagatgtaaaactttagatatttaagatgtagttacatacatattgatatttgaagtgagaaatattggcaagcaatatagaaataagtaaaatctccattgtctcatggtttgtatacatttcatcaggaaattagaggagatccatagaaaagcaattagaatggggtaatttggtagtgagttagcatgaaatacaatgaatatactcaaacgagtagctttctcatggataattatcttttatttttaaaatatgaaagaataaagtacttcacatatacattgttaaaggtgttgaataattcttcaagttggaatgaatataattcttcaaatgtccacccaggacacccagctcctcttgacaggacctgaccctctgtgcccagcgtcatcacggcaagcatctcctcactcaccagccttggagtcggacttgttttgtggtgggctgagggtctcagctgctcctgagaatcaaaacagaggagaagagacatattcagaggtaactcatatgacaaattattcaacacctttgacaacttataagtgaagtatttgattcctttatattttttaaacaagaggtaagtacccatgagaaagctactggtttgggtatattcattgtatttcatattaacttattaccaaattgccctcttctgatttaaatttaaattaacaattttaaagcatctctttttcctataaaagaggtttagttagatgtcagaattatccagtgattggacaacattggacatgaaccccccaggcccagagctgggctgcactgtagcccccgctgacctcccccgggtttcccatgccacagggagccgcccagtcagtttccctcgggccactgtgctttaaaacatccaaacacagccgggcgcggtggctcacgcctataatctcagcactttgggaggctgaggcgggcacatcacaaggtcaggagatcgagaccatcatggttaacacagtgaaaccctgtctctactaaaaatataaaaaattagccgggcgtggtggcgggcgcctgtagtcccagctactcgggaggctgaggcaggagaatggcgtgaacccgggagatggaggttgcagtgagccgagatcgcgccactgcactccagcctgggagacagagcgagactccgtctcaaaaaaaaaacaaaaaaaaagaaagacagcagattctaaaacagtggagatggaggttgcagtgaaccgagattgtcccattgcattccagcctggacaacactgtgagactccatctcaaaaaaaaaaaaaaagttttgagtggggtgtggaataggggaaggctctgcaacagatccaggtcctgcacaagctcttctgccacctgggccatatgatccagtggaacagatggtgcttgaagtgtcagtggcagatcgagatgctgtttggaggttttgacaagctccttcctataggtgaattggggcttagacacttaggattgtggagcaaaatcctatcatcattcacagatagctagtctccttttgaaaaacatatatttttttttgccgggcacagtggctcatgcctgtaatcccagcactttgggagaccaaggtgggcagatcacctgaggtcaggagttcgagaccagcccggccaacatggtgaaaccctgtctccactaaaaataaaaaaattagccgggcatggtggcacctgcctgtaatcccagctacttgggaggctgaggcaggagagtcgcttgaacccaggaggcggagattgcagtgagccgagatcatgccactgcactctagcctgtgcaagaagggtgagactccatctcaaaaaaaaaaaaaaaaggaaaatattatatttttttccattattgagccttaggagagactggatgcttgggcacaggtcaccaaggtaccatgaaatgtgaagtgtgtgttagccgatgcaagctgtataataagatcatgtccactcaggccctgaaagtgtgagcaatttacacaaagcagggggccaaatgcccatggttcctgtccctgctacacaaccttctgccttccagcctgcacctataatctcatggggatttctctatgctccgttgacagagaaagtgaagactcaagcctggtttgcagatggttctgcacgatatgcagacgccacccagaggttgagagcttcagcacttctgcccctttatgggacatccctaaaagacagtaaagtcagggcgcaagtgacccccttcctgaggacagagcctgcggctgggcgccttgagtgtcctctcacctgtcaccaccagcaccaggggggtcactgtgccctgaccggcctgtggcactttgataataacagtgacagttctctgcattgtgctctggcttgtgtgagatatgggtcctggtcttgttcccaggccccagtggtttccttaatgttctgtgacactgagcttccctctttatccagctggtgctcttggggctccagggtaccctgacaccaggtggtcacaggcctcctcccagggatcacacagtctggctcagtccaggtggtgggtttagtgaggagccttgaaatgaaatcacaggttgggtcccaagatactaatgcattcctcaaatcccagctgtcagtcccaagacccgcccagatgtccccatcagtcagctcagagatgctgttctccatccccaggtggctgggggtggcccgttgtccccagtgagcaggagcgacctgggactgctggggacagactcacctgcctgcacatgggtcctgaagctcagactcagccctggaagagagttccctgtgagagatttgcccctgaagcctgagcaggtcctcccctgcctgggagcatcctgacccctgagatttcctgatagaccagggcttggctgtggagtgaagtcccttcaagactagggtgccccttctcctcttgaaatctcaccaagtcagagtagggttgtgagggtgggagtcacggcatctcctcccactggccccagctgtacagatggatgaaaccatggtgtccaggaggacagacagacacactcaaaggctgggttctccctgtcatggggttgtcccatcagcagccccacaggaaggggaactgcagaagcctggctctcatttccccagggctgaggtgggagtgagcaccaggtttcctgaagacatttcagacagaaatgggctccccctgatccttggctactggctgcaggatctttcctcatcttattgagggctaggatgtagtagaaaaatgggcccagggcctccctgagtgagcctcttccaggtgagggtaactgagggcttctcttcccctctcagagcctccacatggggtctcctttactccttcatcctgtctatcagcacggggttgtggggtccttaccatggccagtcatctcatccgtcgtggagatgcttcagggaaaatgcaggtccatggtgcagggcagactcaggtcagcagagacgcatctgacatcaggctgtgtagttcaagttgagctgcactgtggcaatgagcgcaatggagaaacacaggaaatatgggtagagaacacgacctgtatccaacactgccagtttgctctatcaacccgtgccctccatggactttccctttctcttagcagcagtatccaccttcgtctccttggaaacagacttgtgatccactcctgagtcttcagtgtcctttgtttccctgaggggaactcacctgttgggatggggagctgatttttacttaatgattgctcattatctgctgcccatgtgaccttgagccttcacaaccccttctctgagcctcagtttccttgtgtggagcaagttgttacacaccccactcatcagaggggtcgtgggggtcggcggtgactgggacttcgaaggagctcaatgatggttaattcccaggacagagtaagacatagggttgtaaatttgagaaaatcagggtgttggacaattgacgctcccacccaagaatcctcatctaccctgagcactaagaaattgtacatataatattgcttaaatacacagattatcacagtcatgagtagaaatccttccttccttcttccttccttccttccttccttccttccttccttccttccttccttcttccttccttccttccttccttccttccttccttccttccttccttcctccctccctccctccctccctcactccccccccctttctttctttctttctttctttcttctttccttttttttttttttttgacagagtctcactctgttgcccaggctggagtgcagtggcacaatcttggctcactgcaaccaccatctcctgggttcaagtgattctcctgcctcagcttcctgagtagctgggactacaggggcatgccaccgcacctggctaatttcttttgtattttagtagagatggggtttctccatgttgcccaggttggtcttgaactcctgagctcaggcaatccgcccgcctcgccctcccaaagtgctaggattacaggcgtgagcaaccacgcccagtcgaaggactagtttttaattccggttctggctgtctggttggttttggttttcctcatgtatgtttgctgagaggatctatgtagttgcctgtgatgcccgttaatccaaaattgccacctcactttcatcagtaggtggtatcttaggccatcgttatataagagtaacttttttttcactttttggaaaatattttatttgccaaaatacatttgagaaaaataatgttgattatacaagcggataaagcaattgtcatatatatatacacacatacacacacacatatatacatctatacatatacacatatatatacatatacacacatatatacgcatatatacatatatacacacacatatatacatatatatatgtatacacgcacacacacaaatatatatacactgtggaatactactcagccataagagggaacaaaataatggcattcatagtgacctggatgaaattggagactattattctaagtgaagaaattcaggaatgaaaaaccaaatattttatgttctcattcctaagtgggagctaagctatgaggatgcaaaggcataagaatgctacaatggactttggggactcgggggaaagggagggaggaggtgagggataaaagactataaatcgggtttaatgtatactactagggtgatgggtgcacaaaaatctcagaaatcatcactaaagaacttctgcaagtaaccaaacaccacgttccccaaaaacctatggaaataagaaagaaaataaaagaaaaatgatgttggttataagttgtgcaaacctgtgtcttaacttgttcattccaccagcataaaatgcagcaacacatgtgcagtgttggccccaggcaaatctgcttgagactcaatgttcaagattgttattaggtggggaccacataggcataatgagcagctacagagaaaccagaggaaaccgggtgttcgccatgaattacactgtttacagaaacagcctagtgaagacataacagcagaattcagtgccgcaggcacacaacctcacgttgtctcttagtaacacaggggacatgctagaagcaagttcctagatgccaaccaagaatcaagctcacaaacaagtccttctaaagttagcatcctcatcactgttaggttaacttcttcttgcatatccttcacctaaaagaaatagtagtcatcttcaatccttcagcacagcgttcacacagcacgtgcctccagctctcccagattcttctagggccagcacagcttttctgatgcagatttttcaaagttctccaaactgaagagtcaatccaaaatcatcttgactttccatgttggcggcctttgggggccttctctggctgtgctgagcctgaaagatcatcccctagagaccgccaggatcaagccagcatggtcattggaatgagattctccattgcatagtctgaaggggcatggtcagtagacagaacagggcattcactgggggctagacaggctgcacccacattgggagcctggatgggtgtttacacattcacactcctgaaagagaagtcgtagttactcctgactttgaaactatacttggtggatgctggttgagaggatcaaggactcctacgaataagagcatgggaggattagagcagctggggccattctactcctgctcccctgtcttggctccttcataacaactctcttccctcttttttttttttttttttttttttttttgagatggagtcttgctccattgcccaggctggagtgcagtggtgcaatctcagctcactgcaacatctgcctcccaggttcaagcaattcttctgtctcagcctccagagtagttgggactacaggggcctgccaccatgcctggctaatttttgtatttttagtagagacagtgtttcaccttgttggtcaagctggtctcgaactcctgacctcagatgatccacctgccttggactcccaaagtgctggggccaccgcgcctggacctctcttcccttctcatgggagaattgtgtaaccatccttgctaacctcaactcccacctcagatggagcactgtatgatttccttcctcaaatttgttcaagttcttgggcctcattgaggtcaccaccaacctctcggtttgggggatattaagagtttagttttgcaaccacaactcagtgacagaaaaaaggaattcaaagatacaggaatacttaactgtgctcctttctcatcttcaatttgttcccatattaggtaaacccgtgcttaaccccttaaggtaaatacctctagtaactcttcatctgtcaatacagaattcagagatgcgtatgtgggactctagattgtaccagagtccagggtacaacagagctaaaggctgtcactgccttttctattgttctgcctcatctaattatctctgtggtccagtgtagcttaatactactactattaaaagtaataatcactgcctcacttttaatgattgggtccactcatctgtcctgttttgcgatgaatgagagaatgattttagaatccaagccttttttttttttttgagacagagttttgctcttgttgtccaggctggagtgcaatggtgcaatctcggctcaccgcaacctctgcctccgattcaagcgattctcctccctcagcctcctgagtagctgggattacaggcatgcacaactacacctggctaatactgtatttttagtagagacagtgtttctctatgttggtcaggctggtctcgaactcttgacctcaggtgatccacccacctcggcctcccaaagtgctaggattacaggtgtgagccaccatgccgggccgcatccaagcctcttttccaggagcaagaaatactacagtgaaaaaaatctcccattgttaattcaatgtagaaactcatgagaaaaaagcaaaaaattttaaggagataaattagaaaacaacatgtgcagatggatacatggacaaaaaaattaagctacctagagatctcgaatgtgtgtcaacctaatacaaggactattagagaatacaggtgggcaagaatcacttaacccactttgtcatggaaaatgtctttgaggatgtgacaggtttggaaaaatgaaaaaatgacaaagtggtcattatatgaagatccagaaaaataatattattcaatataggatcagctgattgaagtattcaacaaatatgcagaaagtttcctagtgtggacaagacttatttgattatgaggaaatttaataagtgctgtgaagtaacatagatctgtattcacagatgtgcaataaattaagtaaaaatcaataaagacataaaatgagaaaaaaacctatctacaataaaaccatcaatctcaaatcattggatggagagaaatatacatatacagaatactctctgagaataactagaataaggagatatgtggccgggtgcagtggctcacacctgtaatcccagcactttgggaggtcg[133 bp omitted]gaggcaggagaatcgcttgagcctgggaggcggaggttgcagtgagcagagatcacgccactgtacaggaagtttcaaacccaggagaggttatctttcaagtactcagtgttgtggtttctcctgccagggtgacaacctgatgattatggaaatctaatcagaaaactgctatcttgcttttattcctacctccacaggatgaaaacagttaatggtagagacaaaatatgtccagagtagacaggagtcacagaaaaagtgaattctgatacgttctttcccaggaagttactggtacagaagtttagaactgagataccttttggaaacaaggatggcattctgcctttgatggatggaagagtactatcccagatttagatagagtttgctaaaggcgtctatcttagagtggctgagccatctccacttcaagctatgactttctgtgaattacccacccacttgtccttcacaataagagcttacccacccacttgtcctacagaataagagggaccttttagtctgctcttctgattgcggacctgattccacaggtgcctggggcatctttgcaatccctaggaatcagcaccatggacaggggcaaggaatagggtccactcctctctccacttcagctggacctcttgttcgttttctttctttctttctttctttctttctttctttctttctttctttctttctttctttctttctttcttttctctctttctctctttttctttcttttctctctctcctcttcttttctttctttctttctttctctttctttctctccttcttcccttctttctttctttctttctttctttctcttccttccttccaacttttatttcagacacagggagtacaagtacaaatttcttacatgggaatattgcttgatgctgaggtttggagtacggatcacatcccccaactagtgagcataatacccaataagtagtttttaaccctcttccaccctctagtaatccacagtgtctatttttcctatccttatgctcatctttttctttacacatttcacctcatactgaccacccagcaggaacaaaatacctcaatgctgcttggaaaataaggctccctcccttcatctctacctttcttcccaggctctctggaaacaacctcttctgtaaagacttcaagggcagaagaataagctgagaaactcagcccagagctgccggagactgtgactcctgtagtctgtgaggaccttgttgctcagccaacatgaagtgagtccatgagggtgaggagctgcagatcccacagactgtttggggcagggacagaaggagtaggtggggttgtggtgcctcttgctctgttcctcagcttcatctcttttgctcaaaggttggccccctaccttttcaaatcttctcattccactcacccagcaccttctgtgacccccgagtagggtaaggcatggagagtgagaatgacccccactttcatgaatttcttcatccctttctgagatgggattgccctatgactggtccctgctgtttttccttccttctatcccaggccggggctctcctagcacagggatgcatgctaaggtttagaatcttaacggatgtggtgcttggagctcctgtactgagaccaaaatctttaggggtcactggggtgtgacaataggggtaaggaggaactatgtggaccacagcactagtaggtccccctgtgggctgaagtcagagggcttggagtaaacttggcctgagagagtaaggccatgtctttcaatcgatggttttggggaggcacaagtgaccggtccttggacagacagaaggtacccaaccagatctctgagtagcactgcaaggtcaagttctctcccgaggacactaagggccctggctcagacaaatggagggtttcttgtacatttctaggaaatatgaaggttgcagtgtgtacaaagcagccccttcccacatgtcctggaccccgaactgagggactggcctcctctctctcagctcctgttagactcttggtgtgggtctttgtaatctccaggcctctcactctccttttctaagttgctctccttggaccactgcctcatcgcatcctctactctaggaccctctccctggaccctcaacccagggatgaccctggtcccaggac[131 bp omitted]aaacccagtcactacaggccaggtgcggtggctcacacctttaatcccagcactttgggaggctgtggcgggcagatcacgaggtcaggagatcgagactatcctggccaacatggtgaaaccctgtcactactaaaaatacaaaaattagcttggcatggtggcatgcgcctgtagtcccagctacttgggaggctgaggaagaagaattgcttgaactcgggaggtggaggttgcagtgagccgacatagtgccactacactccagcctgggtgacaaagcgagactccgtctcaaaaaaaaaaaaagagcgaatggggcttgaaggctacagacaagaggttaggacgccattttggatttatcttttcctggagggcatctgatcttctcccatggatttagttactggttcaggtgtggaactctgaactgaagagatggaggctcagtaaagcacacagggagtgtgataatgagaattgaagtggactgtgtgacacgccaaggaccagagcatgcaggtgtgcagagatgtggacccaacgctgcctgccatgtgggatgtagcctcatgtctcgggctgggaagagaagggaatccaaccaagggaagtcaacattaatagaaaggaaaggtgtcacattttaatggtcctccatggatcaccccagaccagtgtctctgcactcaaacacccattcctccctctagaaattgccagaggctgaggcaggagaatcacttgaacccgagaggcggaggttgcagtgagcccagattgcgccactgcattccagcctggtgacagagcaagactccatctcaaaaaaaaaaaaaaaaaaaaaaaagaaagaaaagaaaagaaagaaaaaaagaaattgccagcagacagtccagatggcataggcctcagatggtcttcccgaacctcctaggaccatcagattcgcttccaaggctccagcattcaatggtgcattgttctctcttctgttcaccttccagctgcagcttgggggcttctctggctgtgccaatcctgaaatatcagaatcccaaggaccaccaggatcaagccggccatgcccatgcggatgagattctctactgcgtaatcctgaaggtgtgaggctggggatggtggacaaagaggtcacagaggtcagggcagatcagtatcacccaggacccctggatgtctccccagggcacccatatcatcttgacaggacctgaccctctgtgccagttccataactgagagcatctcctcactcaccagtcccagagtcagacttgttttgtgacggactgaggttatcagctgctcctgaaaatcaaaacaggggaaggggaaggagaagttcttgaagcaatctgagcccagcctctcccctgagctctgcattctcctagttccctgtgcctctcaacatgacttttatggagttcctccataaaccctccctctgctggagcagggttccctccagtctcctcactgaattatttcagctttcctttgttctttgaatttaaactttgctcctgagtcatttgggaaagagctttcctgcaccgtgaaagctcaggatctgcaaggaaagtggcccccagaagtcactgagccctttgtgctctctgtgcagcctgggacacaggagcacataagccaattcccccagagatgagagtttcacggatccaccagctgaggacccaggctccatggatgacgggttggtcctcaggggctcctgaaagtcagaatcacaaacagctgcctccccttgacgccacctcaaccacctcacctggtgtttcatcatacaataagtctctagtcagctaactattcatatagtcagtcatatatatatacgtatgtatataaatgtgtgtgtgtgtgtgtgtgtgtatatatatgtatatataaatatatatatatatatatatatatatatatatatatatatatatatatatatatggtgttacagaggctcataaaacaatttctgcttttagggccaggcgtggtggctcatgcctgtaatcccagcactttgggaggccaaggcgggcagatcacgaggttaggagttcgagaccagcctggccaacatggtgaaaccccgtctctactaaaaataaaaaaatgagccgggcatggtggcacctgcctgtaatcccagctacttgggaggctgagacaggagaatcacttgaacctgggaggcagaggttgcagtgagcccaggtcatgccattgcactccagcttgggcaacagggcaagagactccatctcaaacaaacaaacaaaaatttctgcttttataaagtgtgagtctaggtgagaagaccaataacaaacatgtaaaagccctccatgtcaaatacattaagcatgtagatatacgtataaaaaatatatgcagatatacctacacttatattcagatgtaacttatataaccatacataaatatgtatatatgtaaaactttagatatttatttaagatgcagttacatgcatattaatacttgaagtgacaaaaattgatatgcggtttagaaataaaaaataaaatttcaattttcttatagttaatataaattttatcagtaaatttggggagatcagttgaaagataattgaaagggaaaaatgttatagcaagctaaaatgaaattaaatgaatatactcaaactaaaagct[185 bp omitted]ggtggtgggtgcctgtagtcccagctactcgggaggctgaggcaggacaatggcgtgaacccaggaggcggagcttgcagtgagccgagatcgcgccactgcactccaggctgggcgacagagcaagactccatctcaaaaacaaaaacaaacaaacaaacaaaagaaatatacatgaatcaaatacttcacttaagaataaagtagttgaagaattttttaaattagactaaatgtacacattcttatgaacggaacttgaaaacacttattaacttcattaataaacttcaattttatatattaataatagaaatacttgctattaacaactaattttatacagcaaatgtaaatattgaattatgcccccaggacaatgggagtggaattacttgtttttaaatcataaatccatatatcttaaagagacaaatttaaatattcaaatattgttttaaaagattcagaagaagagagaaaaaataaacaagtatgcccagaaaatgcagagcagcaatgaacagcagacaagacgtgctgtgaataagttcctaacttcctccagggagcaggtgcgcggcccctcctttgtctcaggggtgccctgagcacagaggcctccaggtgagcacaggaggggcggtgtgagtggtacccacagctggggcgcttctctctaaaggagcaggtctggcgtggactccagcctcatcaccgtcagatcccaccgaggcctgagcagcctcctcccctgtcctgagtgggctcagggaccccgcaggtgtgggtgaggggctccatcctcaggggctcttggaaatgagaagtgagagctgccaagggagcgtccgtctgtcctctctccaactcgcctgcctctcttcctcctccatcagccccagcatcttccccatgttccaagtcaggcctggaccccaaatcctgctgaccaggtctgttctccttcctctactcatcactcatcccgcaggatagggtaggggcctgggagtcttgtaaagctgcatggtttttagtagaaaatctgaaacgcttcgtgtgacatgtgagagagaggagattctaaacagtggggtttttacacatctttgctttctcataatattgtggcttcgtctcacgaacctcagaccccagcactgatggatatgattacatgtacctgcagctgcccctcttggctttctaacccttgcgaggcatagctattggcaagagcagaccaggtcttagggtgagtgatgggagctgcttttctaggtctaggatgagccacatctcagatgccccacaaggtcagaaatgagggggctttgggggtcacttccaagctcagggggaagtcagcctgggagagcccagcctggggctgccggccagtggaggaggtcacgtctgtcctccttgtagagagcaaacctgtcatagccaacatcagagtgatactggagggtcaggttctctccagggaccacaacagggccctgcggggtcaggagggagggctttctagacacacctggaaggataaaggagccgggactgcaggggctggtt[136 bp omitted]tcccgggttcgagcgattctcctgcctcagcctcccaagtagctgggattacaggtgtgtgccgccacgcccagctaatttttgtatttttagtagaaatggggtttcaccatgttggccaggctggtcttgaactcctgacatcaggtgatccacctgcctcggcctcccaaagtgctgagattacacgtgtgagccactgtgcccagcccttgctttgttttcctcaccctgaatttgtgtccctaggatttctgtgttctccttcccctttttgtctttcttagcaggggctgccctgcctgtaaagctctccacaacctgtctggcttccctgaattgtactagagaagactgtggcttcctcacctgagaccggaatctccaggaggtcactgggttctgaccatacctgcaggatatgcctgcgagagccatagcatctgagcatccacctgtggctgggggtcacagggcccacagggaacagggcctggaactgcccactgggggtcagctgtgagtccaaggtccaggagagcttgtggtctccttcctcagtcagaatgaacctgtcgaatctcagccgtgagccacactggagggtcacgttctctcctgaggtcaccacaggactgggcagggctgagagggtgggtttgttgtagaatcctaggagagaaggaggcaccgtgttaaatggggctcccacctcccacatcatccccagggctgggctgtgaaagggagacacccctgagagccgacccccttcctgagggcagagcctggagctgggaccccagagtgtcctctcacctgtcaccaccagctccagggggtcgctgggctctgaccagcctgcagggctgtagtagtaacagcggtatctccctgcatggtgctctgtcatggatgggatggagaatctggccttgttcttgggctccagtgggttctgtgtgtcccagggttctgggcttccctctttaaccagacggtattcctgggcctccagggtcccctgacaccggatggtcacagagttcccccggctgatcacagagcctggctcagcccagagggtggctttggagaggttccctggaaggaaatcagagtctgggctccaagacctccccacccctcagatcccagctctcagccccaggaccctccagacgtccccatcaatcacccagaactgcggtcttcacccccagctgcccatgggtggccctttgtccccattgaggaggagggacctgggacagctggggacagactcacctgcctgcacgtgggtcctggggcccagactcagccctggaagagagttccctgtgagagatttgcctctgaagcctgagcaggtcctcccctgcctgggaacctcctaaaaccctggagtttcctgatagacaagggcctcgttatggggtggggtccctcccagactagggtgccccttccctgaggcttccaatctcaccgaggcagagcagaaccatgagggcagggctcacggcgtctcctcccactggctgcagctgtgcagatggatgagaccatggtgcctggcaggacagagagacacacagggtgtggcagctcggaggctgggtccttcttgtcataggattttctcattctcagcccacagaaaggggaactgctctccccaggagcctggctctcatttccccagggctgaagtgaagtagttgagactacaggcaccaggctctctgcagacatttcagacagaagtggggtctcccttccccgggccactgtctgcctgatttatctttatctcactgagagccgggacacagcagcaaatagacccggtgccttcctgagtcagcccctttcaggcgagggtgacctcctccctctcagagcctccccatggggtctccctccctccttcagcccgtccatgagctcagcgttgcggggtccttaccatggtcagtgatttttcagccctggagatgcttcagggaagatgcaggtccatgccacaggcagactcagatcagcagagacacatctgacacctggctgtgtagcccaggctgagctgcatgtggcaatgagcacagaggagaaatgcagggaaataggggaggaaatcatgaccctttagtggccctggagtgttttctttctaaccaatagtactctctttcttgtacttcccttaattttttttttttttttttttttttgcaacagcgtccacctccaccccacctccagtaacaaacctctgaatcttttctgcctccactgtgccttctgtttctttgggcttccctctatacctcaatccatgttcaacattttcggagtaattacttaggctttgttttaaaattttcattcttatgtatctatttattttttaatttttgtgggtacattacttaggtttgggctctggtttgctgagtgggga[132 bp omitted]tctcctgcctcagcctcccgagtagctgggactacaggcgtccgccacc[184 bp omitted]tacggcttgtgtgatcttgggcagtactgtctcatctctgagcctcagtttccctgtgtggagcctgttgtcatgaacctcactcatcacagcggatgtgggggtcagccgtgcttgggtcatgggagaggctcaatcacggttaatgtctagactagattaagacatgaggggttgggacatgagaggattctggtttcagtctctatgattatgtcacagaggtgcagaaaaagcatttgataaaatcctgcatcccttcatgataaaaattcccaacaaacaaggtacagagggacatacctcaaaatactaaaggcgataggtgacgaaatcccagccaatatcgcaaacagggaaaaatagaaagcattccccctaagaactggagcatgacaaagatgtgcactgtcaccactcttcaacgtagtactggaggtccttgccagagcaatcaggcaagacaaagaaataaaacacatctaaattggaaaaaaaaaaagtgaaattatttctgttcgctgatgatattatcttatacctcaaaaaccctaaagactcagccaaaacactcttagatttgataaagaaatgcagtaaagtttcaggatatagaatcaaagtacagaaatcagtagcatttctgtactccaataatgacgaagctgagaaccaagtcaaggaggcaatcccatggacagtgggtgcacaaaaataaaacacctgggaatatatttaaccaaggaggtgaaagatttctacaaggaaaacttcaaaccagtgatgaaagaaattgtagaagacacaaacagatggaaaaacatcccattctcataaatcagaataattactatgattaaaatgaccacattgcccaaagcaatctacagatttaatgcagtccttacaaaaataccttcatttttcacagacttagaaaaagaaaccttaaaagttatattgagccaaaaaaagagcccaaacagccatagcaatcctaagcaaaaagagcaaagctagagacatcacattaactgactcaaagtttacaaggctatagtaaccaaaagagcatgacactggtataaaaatagacatataggccagttgcagtggctcacgcctctaatcccagcactttgggaggctgaggcaggtggattacgaggtcaggagttcaagaccagcttggccaacatggtgaaaccccgtctctgctaaaaatacaaaagaattagccaggtgtggtgatgggtgatctcaaattaacaacctaacatcacaactaaaagaactagagaataatccgcccggcgcggtggctcacgcctgtaattccagcactttgggaggctgaggcgggtggatcacaaggtcaggagatcgag[135 bp omitted]gcttgcagtgagccgagatcacgccactgcactccagcctgggagacagcaattggaatgcaatttagaaataaagtgaaatttcaacttttgtgtgagttatgtacattttattagtaaattagaggggatcaattgaaaataattggaattaagaaattctgtagtaagttggtataaaataaagtaaatgaactcaaaccaattactgtatcatgtatacctagcttttatttataaggaatcaaagacctcatttacagattattcaagtgattgaataattgtttaaattgaaataaatatataaaattcttataaataaaatttcaagacacttcttaagttcatcaataaacctcaattttaaaagtttaggataggaaaacttaacataaataagaaactattttctaaagcaaatatataaatgaaatcatgtcccaaattaaaatgataagtttatatattcatgtattgctttaaatgtttcagaagaacagagagtaacaatagacaagtgtgcacagaaaaggcagggtagaaatgaatgacacacaagccgcgctgtgaataactccctaactcatccagggagcaggtgcgtggcccctccttactctcaggggttccctgagcacagaggccttcaggtgagcacaggaggggcggtgtgaggtgcacccacaagtggggtgcttctctctaaaggagcaggtctggggcggaccccagcctcatcccagtcagatcccaccgaggcccgagcagcctcctgtcctgtcataagaggacccagggaccccgcatgtgtgggtgaggggcttcatcctcaggggctcttggaaatgagaaataagagctcccaagggagcgtccatctgtcctctctccaacttgcttgcctctcttcctcctccatcagccccagcgtcttccccatgtctgagtctggctggaccccaaatcctcctgatccagcctgctctccttcctctgctcatcacatatcctgcaggacagggtaggggcctgggagtcatgcacagctgtgctgggtgttgcttttagtagaaaatctgaaacagtgtgtgatgtgtgagagaggggagattctaaacagtggggtttttacaaatctttgctttctcctaatactgtggcttcatctcacgaatctcagaccccaacattgatggatacaattacaattacatgtacctgcagctgcctctcctggctttctaacccttgcaacacacagttattggtaggagctgaccaggccaagggagggctgggggacggcagcaggtctaggatgagccgcaacccagatgccccagaaggtcagaaatgaaagggctttgggggtcacttccaggcagctccttcttattcggatgggaaaggccagggcggaaggggaaaaggctttctcagaagttctgaggtaggatgtgggactttggaggcggggactcagacaccacaccagattgagaactagctaaaacagggcagagggtggaagcagctcttcttaagacacgcccaccagtgtggcatcccggtttaccgttgccatggcaacccccggaaggtaccgcccttttccacggcaaagacccactgaccggaagttaccgccctttttctaggaatttctgcatacctgacctttaatttgcatataattaaaagcaggtacaagagtggctgcaggtgtgtttctgagctgctattctgggcacaccgcctgtggggcagccctgccaccctaggagcagtacctctgctgctgctgtgctcggccacttgactagaggttgccgtaacccttaaggggttgtgtaacaccagctcacccttaaattccttttttttttgtttttgagatagagttttactctgtcacccaggttgaagtgcaatggcgccatctcggctcgctgcaatctctgcctccggagttcaagcgattctcctgcctcggttccgaagtagctggaattacaggcaccagccaccacaccctgctaatttttgtagtctttagtagagacggggtttcaccgtgttggccaggttggtctcagactcctgacctcaaatgatctgcccgcctcagccttccaaggtgctgggatgacaggtgtggaccaccgcgaccggcctaaattctttcttaggcaaagccaagaactcttctgggctatgccccgatttgggagctccccttccccgcatcatctagttaccaggaagggatgacggagacagcgagtgagaggcagagagactttccgcagaggcagggacaattaggagagaggcgagatggctagacagcagagatggtgacagtgatcagcggaggggtggcaatgggtgaaagacacggagaggtggcactgggctagacagcgagaggttgctgagacagtcggagagacagcggggcggggcagtctgtgatcagggctccaagagcggtcacacaggctgtaacagtaaacagctgctaatactgcagagctgtcacactaaccaaaggctttgcttttggcgccttcatctttccttggatagtggtggagctcagcgatgggcaagcaggtgagacccccgctccaaccgacaggcccatgggttaccagtccccgcaccggacccctgggtgacagctgagcccacccaagctgggggatcctgcagagaccttcacctgggccccatgtggaagatttttgatgttatttaggcttttggggatgggggagtgtcccctctgcctcccccgtaatatctggtgagccgtatgggtaatgcgagcactagacacctaaaccccaccagaacgcaatgcatccatgtaaggaacctgcgcgtgtagcgcctgaatctaaaaaaatagagtaacattaaaaacaacaacaacaataaagccgtgtgaggtggctcacgcctgtaatctcagaactttgggaggccgaagcgggtggatcacctgaggtcaggagtttgagaccagcctggccaacatggtgaaacaccgtctctactgaaaatacaaaaacttagctgggcatggtggtgggtgcctgtaatcccagctactcatgaattatcatgaagagaaaatgggccaggtgcggtgactcacgcctgtaatcctagcactttgtgaggccaaggcggacagatcacctgcggtcaggagttcgagacaagcctggccaacatggtgaaaccccatctctattaaaaattaaaaattagccgggcatgatggtgggcacctgtaatcccagctactggggagtctgaggcaggagaatcacttgaacccaggaggtgaaggttgcagtgagccgagatggtgccactgcattccagcctaggcgacagagagaagcttcgtctcaaaaaaaaaaaaaagagaaaaaatggtccacaataaaataacaggcggttattgtacctgaatttatcagtaaaaaattgaattttttcttttattgcctagagtccaccttctatcaatgtcacaagcatgacactcagaacagagaggaaaagattatatttgaagtcctaatataaatttaatttaccatattgaagtataagtattttagagttgcttcatgaattttttgctaaaatctaaaaagaaaacccacaaaaaaccctaaatgtaatgacgttaatgcagttcctgacagtgacttttagcccttctgcaaacttttgtttcgttgccttcctgaccgtatgacgcaatgaaatttcgatttgctttaatttctgcttcctctttccctatgtttcagttctgaaggtatgagcttctctcatctttttcttttcttttactttgagatggagtctcgctctgtcacccaggctggagtgcaacagcctgacctcagctcactgcaacctctgctacccatgttcaagtgattctcctgtctcagtctcccaagtagctggatgacaggcatgagccaccacgcccagttaatttttgtatttttagtagagacaggatttcaccctgttggtcaggctggtctcgaattcctcacctcaggtgatccacctgctttggcctcccaaagtgctgggattacaggtgtgagccaccgtgcccggccaggatatttttttctttagagcacttacttcactttctttgagtgaagttggatgggttacagccgttgtggtgttacaaagaataattctgagagaaatattgttatttgttggtaaaataaaagtgtcttaagttaaaagtttcctttgagacccaataaagaaattagtattactacataatgcatttatttacaagtctttttttgcatgtccattgtaaatttaatattttaatttacaatgagtttacaaataatttttacaaataaatgttacaaataaaaataatttacaatgagtaaatgagttggaatttatttacatgcttatggctgcctttgattaaacttcttccaaaaataaactctgtccagatgttgggttttattatacttaatttcattttaatgttatttcatgtgagattacttgaatacaagctgttgcataattgctcccaagtggagtctttgctgtgcacttgcataccccagagtgggaggtttggggattctgaatggccagggcagcgtgtgggtgtaccttcacaggcctgatgtgtgagccttcaaacaccggggtggaggaagtgattaaatagaggatgcaatggtctggaggcaatttatagcccagagaccatacctggggcatttctcttccttatctagcacacaaagtagaaccgtgacactcgggcgtcactgacaatgaacacaaaggggctgaatgtcgggaatcctgcagacgccaggaaagaggtacttctcagccattggcttggattctgaatctgggttacgcacaatgacaaaatatcagctagagcatgagaggagacaaacatgctcaccaggatgaggatggtgtgtgtggttgtggtttcatgagatgttctgcgggagaggttgcggctgcgaacatgttggactctctgcttgtatctatgcaggacgaggaccatggagctgctggtgcagatcatgagggagacacatatacgggagacacatataccatctgtgcagcagtaaatgactgcaactattacatacagcgatcttcctggatagggtgaggagcagtatctatacattttttccatactcatgtttttgctctttattgggtcagttatttactttgcagtataaatatttacaacaagattcaagatccaacagaggaaacagcagaaaactataaactttggggatctaattcagagttccatcttcccagagatactggggtgaagcttcatggcctggaagccactgaagaggcaggtggtgctgagggaaacccctctggccactctgtgtaggtagaagacaagtttacatccagcctcatccaggaaaggtttcaatccaaaagccgccactgtctgagggatccctttagagaaaagaaccgggttgttggctaagaccagctggctgagaatcaggtctctgggtctcactatttgtgtggggacaaaagtaaagctataaaagtaaaggagtagagaatttccaaggattccagcagcggtctgaatgagaaaggtaatactccaatttaagttaacagaaaccatctccatttagaggagatgttggagtttgattctattttcatcagaggaatctgtagactgaaaaatacaattgagtgttttcactgtacccggtttcatgcgcttccgtgtgaagagaccactaaacaggctttgtgtgagcagtaaagcttttaatcacctgggtgcaggtgggctgagtccaaaaagagagtcatcgaagggagataggggtggggccattttataggatttgggtaggtaaaggaaaaagaggggttgttctctggtgggcaggtgtgggggtcacaaggtgctccgtagaggagcttttgagccaggatgagccaggagaaggaatttcacaagataatgtcatcagttaaggcaggaacaagccattttcacttcttttgtggtggaatgtcatcagttaaggcaggaaccagccatctggatgtgtatgtgcaggtcacaggggatatgatggcttagcttgggctcagaggcctgacacccagaaaatgcctttttctcacgaaactcattattccaggtgaatacaaacattaagaacaaacttgtacaattacaaagctatttattccaaaattatgatttgtaaaactacaatgacttgaacccacttaatttcaatcaaagaaagactcaataaattcctgggcctccccacagtggagtcctgggcagctgtgggtgagatgaatgagttatcttgaaggctgaccttccaagacgtgtagttgtgtagttggggtggcagggagaaaagaaaaagaaagattcaggacgttatcaacagttaactttattttactcagaaccagagaaaaatggtatagtgttatgtcattgtgtgtgtattttgtaatctattttttaaaatgaaagattaatcaatacctttaaaagtgggtagttgagagagagagagaaaacagtgcagaggagacagaataaagctagactgacatcattgtgtcttgtttcttgttttggtatagaaatataaacatacctttgggaggctgaggtgggcgaatcgcaagatcaggagttcaagaccagcctggccaacatggtgaaaccccacctctactgaaaataaaaagattagctgggcatggtggcacactcctgtcatcccagctactcgggaggctctgacaggagaattgcttgaacctgggaggtggagattgcagtgagctgagactgtgccactgcatttgtagggaccagccccacagggtcggtgggtctctccctgtgtgtggtgacgatagagtgtagaaataaagacacaagacaaagagataaaagaaaaggcagctgcgcccgggggaccactaccaccaatgcgcggagaccggtagtggccccgaatgttgggctgcgctgttatttattggatacaaggcagaaggggcagggtaaagagtgtgagtcacctccaatgataggtaaggtcacgtgggtcacgtgtccactggacagggggcccttccctgcctggcagccgaggcagagagggagaggagacagagagaaagacagcttacgccattatttctgcatatcagggactattagtactttcactaatttactactgctatctagaaggcagagccaggtgtacaggatggaacatgaaggcggactaggagcgtgaccaccgaagcacagcatcacagggagacggttaggcctccggataactgcgggcgagcctgactgatgtcaggccctccacaagaggtggaggagcagagtcttctctaaactcccccggggaaagggagactcccttccccagtctgctaagtagcgggtgttgttccttgccacttacgctaccgctagaccacggtccgcttggcaacggacgtcttcccagacgctggcgtcaccgctagaccaaggagccctctggtggccctgtccgggcatgacagagggctcgcactcttgtcttctggtcacttctcactgtgtcccctcagctcctatctctgtatggcctggcttttcctaggttatgattacagagggaggattattataatattgggataaagggtaactgctacaaacaaatgattaatgatattcatatataatcataactaagatctatatctggtataactattcttgttttatattttattatactggaacagctcgtgtcctctgtctcttgcctcggcacctgggtggcttgccacccacagcattctagcctgggcgacgagcaagactccgtttaaaaatatatatatatacatatataaacatattcctgaatgtctatactataaaatatttttaaatataacttataaatctaaagataataccttaaaaaaggaaatagaattgagttcctatcaaattagggcattactaaacaaggaagaattatttgtactagaatgtaagcaaaattacttgaccatatattttataatgcatatattatttatcatattatataataaatgtatacttttaaatcaaattatatattatgtagtgacatatagttaatattattatataattttgactatatatagtaaaacataagtgaatacaccctcaaaaatgtttaattcttaaaatatgtatggtcaaaaattctaaatttcatcctagagaaatagctgactccacattcggagagaaaatacaggagatgaagtcagaacttcttatcatgcaagaaagcaaagacatcaccacataccatcagattcatgttacctgaacataaagtctatcatgaaaagttcccaatggcaaaatgtggaatatttatagaatcaaataatataggtagtgtattaaaactaatgaatatgttcaaagcctatcagtttactactgttaaaaacaaaattaaaaaacaaaaaacccctcaaatatgaggaatgggaaaagaacaaaatctccacatcaaaaacgtggaaatgaaggcaagaagcaagatctcttttgtttatctgaagtgttacacaggaaacattcttttctgtagaatgtttctacataataataagtatagtaatagctatagtaatgtttttgcctaagaatagctgtagagtttttgcataataatagttaaccctgcaaagcttggataacctgtgcgttgagtatacaagcaataaacatcaatggctgccaaaacccttaggctgaaggttgatagtgaatataataacgagtggatcctgctgatagtacagccatcagtacagaattgcaaggtggagaatgcaagacacaagcaaatgagccattgtgtctcacttctgacattttctaagcatctttttcaccataccctcaaatctagaccgttatctggctgggcgtctctatgtttcttggatttgtgtgtcaaactctctagcgagtttaggaaaatattcatggactatatcctcaaatatattttccaagttgcttattctctcttcccctttcaggaatgctgacaagtcatacatttggtgtctttagataatatcatatttctcagagattttgttcacttttaaaaatattttttccttatatttgactgatttgattcaaacaagtcttcaagctttgaaattcttttcctcagcttggtctattctgctgttaatgcttctcatcgtattatgaaattcgtgtcatgaatttttcagctcgagaagttcagtttgggtgtttcttaaaatttaatcgttcatgtcattaatcattttactggattgcttggcttccttggattgaatttcaactttgctcttgatttgaatgaccttccttgccatccagattccaaattctacgtttgtcatttcagacaattcatactgattaagaacaatttctggggagctcgtggactggtttggagataataggagttatttccctgattttttttctcatctgggagggttgctattcctttcattgcaagggtataaattgagtatagtctgttggctttatttctggaagttttcaggggactaaggctctgtacagggtctttgctgaattcttgctcttggttttccaggcggtagaatttagtaaagtgatttttggtgttgtagtgtggctgtaatccagtagatggcgcttgagagcaataggcaatagacaggctcttactccactgcgtggtgcctttgtttatctttgttcttgaccttgatacttttgaaaaggtcagagcagtttttttgtttttgttttttgagacagggtctcactttgtcacccagggtggagtgcagtggcacgatcttggatcactgcagcctcaaccttcccaggctcaggtaggtgacagagcaggcaagttaacttaaggcctcctccttggcaatctggtctcaagtaggggacaggtccccacagacagaactgaggggcaagtgtggcatgggctccagaccccgagcactggaattagacacctctcctttgcagaaaggtttagcctttcctcaagcggttctgcaaaggagaggtgtagctggggtggcgtgggcaatggtggtggcagagtttgtgtgaaacttgtctcttccccaatcactgtcacttgtttcaggagacgttgtaatgtgctgtatggtttgacctccaggccagtaggtggcaattgctggtgagagccagttgtagcgctggcagtgggctttatgcttgacctttgttaaccagaagcattcaggtatcctaagtgatgggttgggttgtggaaaactcagtggtcttgatcagtactctgcctccaacgcagggaaatgaaggtaagtgtggctggtccaggcaagcctgtactcaggcccaatgctaggcacaggctccgtccccacagaggctacatgtgtggttctcaggtccctggagagacactcaagcactgagtagggcaatgactattatgccaaagttacagcagagttccccagaggggcacgttgggttccaagcctagaaaatgacagtgggactcactttaatctaatgctcccaacccagcagagctcctccctgtggcccaatgctggaagcaatttcagaccgtcaaatcacatgcggtttgatgtcagaccactcaactaccccaggccacagatcttgcctcctgggtaaaatccatgcctctcaggctacaacttttccccctcggttctgtcaaagagaggtgtccaacgccagtgcttggtgtctggagcccatgccacaattgcctctcagttctgtccatggggacctgtcttctacttgagcccagattgtcaatctctggcccaagactctccgaagtag[138 bp omitted]gcctc[358 bp omitted]aatggcctctttctatcagcatccaggtctgggagcacacatggagcacttccctgggcccttccttttcacagtcctcccgctgttccctaagtcagatccagggcttaggtcggtcaaagagctccccagtggcctggattgcctggctccccactgagaatgggtatcatgtggtctcataacttccctctcaggcactggaagttcactcatggttttctgccaggtcttgctgcatgagctgctgcctgccttctttttagcagtatctgagatttccttcactttcatattcaactcctgtattagtccattttcaggctgctgataaagacatacccgagaccaggtaatttataagaaaaagagatttaattgactcacagttccacatggctgcagaggcctcacaatcatggtggaaggtgaaagcaacatctcacgtggtggcaggtacagaggaaatgagagccaagcaaaaggggaaaccccttataaaatcatcagctcttctgagacttattcacgaccacaagaacagaatgggagaaactgcctccatgattcagttatctcccaccggctcccacagcacgtgggaattatgggagctacaattcaagatgagatttgggtggggacacagccaaaccatatcacctcccatgttctttcttggatacaagaatgcagaatgaatctctacacaccattttggtattttcaccatctcggaagacataacagtgtattatatccttaaaaatcactataaaagtagattttaagggttcttaccacacaaaaattagaaatatggaaagtaatgtatatgttaattagattgatttgcccaacagacaagtatatatatttcaaaactacatactttacacaataagtatatacaatttaggaatttttcttttttctttttttttttgatggagtctcactctgtcaccaagctggagtgcactggtgcgatctcggctcactgcaatctccgcctcctgggttcaagcgattcccctgcctcagcctcccgagtagctgggactacaggcgtgcaccaccacgcccggctaattttttgtattttagtagagatggggtttcaccatgttggccaggatggtctcgatctcctgaccttgtgatccaaagctgtgttatgaacatgaagttctaaacacattttctcatatgttcacacatgtctcattccagcctcagtgctcatggggtaggatctccttacctgagaccacaaaccctgggggtccctggggtgtgaaaacaggtagggggaggtactctataagacatagcacctgtaggtcctcccagcattcatggagaattcagcctgtactgctgagcttggtactttgatattagacacaaaggtagggatctgctgctcccttcttggaaataagaaaagtgtcactgatgtagcaggaccatgttctttcctgaggccaccatggagcccggctgcaccaacagggaatatccctcaggcagctgtcctagagagaggcaggatgggtgaggggctgcccccaccttgttctgagcagagaccttcccagggcttctctctaggaccctcagtctctctgtcattcactgtttcctctgagtctcttcctctccctcccatccaccttgcccctctgtctctttccctctctaaagaaccttatccattgacatggtttgattgtgtccccacccaaatctcatcttgaattgtagctcccataattcccacgtgttgtgggaggaacctggtgggagataattgaatcgtggaggcggtgggtggtttcccccatactgttctcctggtagtaagtctcacgagatctgatggttttataaggggaaacccctttcacttggctctcatttctttcttgtctgccaccatgtgcctttcaccttccaccatgcttatgaggtctccccagccacatggaactgtgagtccattaaacctctttttctttataaatcacccagtcttggggatgtctttatcagcagcaagaaaacagactaatacactcatcatgctggtcatcaccgcctgcagatccccagcaggccctgtgcagaatctgggtccctgagtgaacctgctggacccctcacctgcaatagcatatccagggg[137 bp omitted]caaaacccagtctctactaaaaatacaaaaaaaaaaaaaaaaatttagccaggcatggtagtgtatgcctgtaatcccaggtacttgagaggctgaggcaggagaattacttgaacccaggaggtgaaggttgcagtgagctgagatcgtaccacgcactccagcctgggcaacaagagcgaaactccatctcaaaaaaacaaaaacaaaacaaaacaagaaaagaaaagaaaagacgttgcgtttagcacagcatctgtcctggctcccatgggagccactccaaggaaacgtcagcctgacggagcccagcctggggctgccagccatggtgccagggtggtcatgtcgcctctcctcagacaggaaaagtccttggtggccaacatcagagcaacactggaaggtcagactctctccagagattaggaggggcccctgtttggtcccgtgcagggagtcctagacacacctagagggaaagacaagtcaggactttgggggctgactcccctcaaatacatcccttgtcctcctggctctgcagatctcaccatcacttatactctgtgtctctggccccagaagccctcgttcccctcattccaccctcacgcttgggacttgcctgggagcaagatccacagcaacctgtctgatgcttcaaagaatgtttggggtaaagatgggacttcctcacctgagaacaggagcttcagggagttgctgaggtccgaccacacctgaagggtgttctgacttcctcacctgagaacaggagcttcagggagtcgctgagttccgaccacacctgaagggtgttcctgttattgccatgacatctgaacatccatctgtggctgagggtcttggggcccacaggaaacagagcttgggactgtccactagggtgttgctgagagtctagggtgcaggagagactgagttctccttcctcggtcagaatgaatctgtccagttgcagccatgagccacgctggagagtcctctcctaaagttgcaacaggctcaggggggctgagaaggtagattttctgtagaatcctaggagagaaggaggtagtgtgatccttgaggctcaagcctcccaccttatcccttagggctgggctgtgagggagagacacccctgagagcagacccctttcctgagggcagagcctggggctgggaccccaaggtgtcctcccacctatcaccaccagctccagggagtcagtgagctctggggctgaaatagtgacagtaatatcatcctacatattcatttgtcatggatatgatgggggaactcggccttgtctccaggctgcagtgggctctgtctgtcccaggacactgagcttccctcttttttttttttttttctttttttttttgagacggagtcttgctctgtcacccaggctgcagtgcagcggcgtgatctgggctcactgcaagctccgcctcctgggttcacgccattctcctgccacagcctcccgagtagctgggactacaggcgcccaccac[131 bp omitted]caccacgcccagccccctcttttttttttagttggagtcttgctctgtcaccaggctggagtgtagtggcacagtctcagctcactgcaagctccgcctcccgggttcaagtgattctcccacctc[134 bp omitted]gcctctcaaagtgctgggattacaggcatgagccaccgcgaccggccctgggcttccctctttatccaatcggtactcctgggcctccaggttcccctgacaccagagggtcacaggcctctcccaggtgatcacagagcctgtctcagcccatggggagggtttggggaagggccctgaaatggaaccagaggctgggtcccaagatctctttcactcctggttctctagtttagtccaaaacccctctctgttttatcaccctcagcccagaacaactgtgccccccaacctgagagcccaggggctggagtaagagggaggctcgtggagaacctggtagccccttctccctccatcactgactgaggcagagaagcacgaacaccgtgatgcctgctctgggggctccagctgtgggagaggagaccacagggccctccaggacagacagacacacggatgtggtcactcagagcctgctgctgcccgtccaggtacccacagctgtggacccacaggaagggaaactgcttttccctgggcctggctctggttttccctgggtgggggagctcaggaggaccccagactctctggacacatgagcctctgctcccctcccctgccccaggtcaccgtctctgctgcaggtgggacaggacaggcccctgtggaatcgggtctgggagtttccctgggaggcctcctctcccaggaggtcacagctgggagtcagagctgaaaggaactttcccacccgcaggcctctctcctttacacttggagaaactgaggcccaggcagaggaggggcctgtccacatcaccacctccagaggagcctcaaaccgatgacagaacccacccctgcctcccctggaccccgcccacctcccactcaaagcccctcacttagcactgtgggggcctgacgttgtgggggtgaggggctggtccttagggcctgctgggtcaggatggggaggtgagggctggggctgccctgctccccacgtcagcccggctgctcctcccccaggctgggccccaacatctccctctgcctcgacccccgcccctcaccagcccagcctcagagccccggggagcctgtggcccctcctctggctctgcctcagctccctggagggaagctcgtgcttgagtccttgaggggaatgggatcatctgggagactcaggactgccctgggggaggccaccctccctctgagcccagaggcctcaatgactcaccaggtatggagaaggagcctatgggtggagggctggggcccctggagggtcctgggaaggagcacagaaagggagtgaggaattggagctatcctggagtccccacctccactcaaagctctcctctccatctgcccagtggcctctccaagaccctccctcttcccacctagcaccttctggactccaggtgaaggagaagagggagaactcctgttggcttcttctcctctgaggggtgaattcctctgtggctgagtctccctcagagcccccttcactccatctctgcccagagctctcctgggggcagggcctgagctgagtctttgaacttagagaggacagggtcagggcctttcacccaagaccaccagctccgactgcggtgtgatagcaggtagggggaggtgcagtcatgtgagaatcttgaaggtgcccatgaagggagtgtttataccacagtcatcaacaaattccacaaataaatgctttttagaaaacttttttgttgttgttcaggaagccagtctatgcgcacaacagcaggcttttccatcaaacacttctcttttgattcctagtgactgtatctctggagaaactacagatgaagagtgacaggtggtacagcatcactttgaacttaaattttccaaacacgaatctgatttttgcccatggatttaattatcaaaagcaaattccatgttatgagctgaagagatagtcccagtaatacacattagaaaatgcagtagttagaaataaagaaaggtgtattacctgaaagtggagcagagcatgaggtcacagaggggcggacccaaacccaccataggggtgaagccttacatcatagggaagaaaaacgaaggaaggggcagtcaaggagagtcgacaatgaggaggaaagcaccacagtttaatggaggaagcatcttctacagacacccagacatcttcctgcacctgacccatgcttcttccccttgatattctcagcagacacttccccaactgctgccccagtcttccagaacctcctcagatcatcagatctgttcccaaggctccaccactctgaagggtgcattgtcctttctgctgtttgcctcctggctgcaccttggggggcttctctggctgtgctgagcctcaaataacagaatcccgaggaacagcaggaccaagccagccacacccatgcggatgagattctccactgtgtaatcctggaggtgtggggctagggatggtggacaaagaggtcacagaggtcagggcagatcacaattaccaaagacccctggatgtccacccagggtacccacctccccttgacaggacctgaccctctgtgcccagccccataactgggagaatctcctcactcaccagtcttggaatctgacttcttttgtgctggattgagggtctcagttgctcctaagaatcaaagaataaggatgttggtgagaagctgaagagcctctcccctgggcaatgcattcttatattcctccacctctcatggtgtgactttatgtagatccttagtgaacacattctctgctctcacaggcctcccctggtacgtcattgggtttttcaacctctctgtgctctgggaattcagatcttgtgcctgagtcactttgaaacaaagtttacttgagcccaggagctcaggattagtaagaagaatgatcccccaactagaaagaattgagctcttgtgtgctgtcttggatgtgcaatcttgtgcaacaagaacacaacaactaattcccccagagacagaaatttccatttttcagtggatgaggacccagtctctgtggatgaggagttggtcctcagtcactcttggaagtcaggagcacaagcaagggctggaggctgcaacggcccccactgtgtgcgcctcagacagctcccctgtggtttcatcatccatttaatgtcttgttaactaattcttcatatagttaggaaacctacaatgtgatatgcttaaatatgaaaatgtattcttttctaaatgataatgactaagtgggacagaaaaacatcatttctgcttttttgaagtatgaacctagattggaaggtgaaaagcaaatatttaaaa[131 bp omitted]cggtgaaaccccatctctactaaaaatacaaaaaaaaaaaaaaattagcctggcatggtggtgggctcctgtagtcccagctacttgagaggatgaggcaggagaatggcgtgaaccccagaggcggagcttgcagtgagccgagatcgcaccactgcactccagcctgggcgacagagtgagactccgtctcaaaaaaaataaaataaaataaaataataataaaaaataaaaacaaataaatatttaaaaatctgatgaaaaatattaagcacaggattgaatacttgaatatatgtttgtgtctatatatgtacatagcacatatattcatataaaatatatgtgattaacatggtttataaaatatatgtgattaacatgctttgcatttgtgtctctctcaaatctcatgttgaattgtaatccccaatgttggaggagaggcccagtgggaggtgattggcttccccctggctgctctcatgatagtgagttgtcacgagatcttgttatttaaaagtgggtagcacctcccccttctctgtcttcctcctattccagccatagaagaagttcctgctttccctccgccttctgccatgattgtaagtttcccgaggcctccccagccaggcttcctgtatggcctgtggaaccgtgagttaattaaacctctttcctttataaattacccagtctcaggtaggtttttgtttgtttgtttgtttgtttttgagacggagtcttgctctgtcccccaggctggagtgcagtggtgcgatctcagctcactgcagcctctgcctctgggttccagcgattctcctgcctcagcctccaaggcagttgggattcaggtacccgccaccatgcccagctaatttttgtatttttagtagagatagggtttcg[140 bp omitted]acaatgattatagatacatatgtatacgtggctttagatatttgtttttaaagtatatatgtaactacgtatatattcatatttgagatgagaaagatgggcttacaatttggaaatataaacgtgaaatttccaattttttatggctgatataaacatcagccccagcatcttccccttgtccatgtcaggcctggacccccggaccccaaatcccgctcaggtaggggaggacagacctgactcctccacctatcattgctgctcccttcttcctgcctggttctaggacacctccctcccctctgaccaccacagagggaacacctgctccatcctcagagccccaggaagccacgtggaccacgcccttattgtccactctcccctctgttcctctgaggaacagacccctttcctgaatattggagataaggttgagatgagtctagaatattatactgggtcagagtaactgcgctttcatctcccacggggtcaggacttagaggctggggacacccagatgttgattctgagatggagacatcaggaagggagcaggtggggcctccgtcttccaccctcagtctaatctcatctcctccaaggctcacccccacctgcttgcagccctctccactctttaccctactgagacttcaggggtgggagcccagggtgggaagtcctcatctatttccacactcccataggctggaccttcccctcggtgggaggttcccatgtatttccacccttccatgggctgggccctcccctgtggaccctcccccttcactgtcctgttttcttagtgtcctgaactctcctgggggcagggcctgagctgagagaggctcagggctcacaaaggccggggctgatggaggaagaagtggggcagcaagtgagacagacagacggacactctcttggaagctctcctttttcatttccaagaacccctttgagctcagagtggacagggtcagcgccctcacctgagaccacgagctccaggggctcactggggtgagacagcaggtaggggttggagctgcgtgagccgtagcacctgtaggtccccgcgtgggctgaggtcacaggactcatggggaattcagcctggtacttatgagctccgtacattgatctcagacgcaacgggggatgggctgccccctccttggtcagaaggaaagtgaacatcgggtcccatgactgacacagcagggtcaccttctctcctgaggtcaccgtggggcccggctgcactgagagggagggtctgtcagagatctgtcctggagaaaagaaggacgggtgaggggctgccccaccttgttctgagctgagacctccccaccagtcctctccctgggaccctcagtctgtccctgttttctctgagtctccccctccccgcccatcccctgtctctgtctgtctctccctcccttaggacccccacccctcatcccggccatcaccacctgggctcccccagcagggcctgtgcagagcctgggtccccctgactgaacccgctgggctcctcacctgcgatcaggatatccagggggtcactgggggccgaccactcggaggagacgttgtgtgcgccgtagcatctgtactggcccccgtaggagcggctcacagggctcagggtgaagttggcctgggagagcccagcctggggctgccggccagggcgctgggggaggccatcggccccctccttgtacagagtgtatctgatgtagccgacatcagagccacactggagggtcagattctctccgggggtcacgacagggccctgcagggtcaggagggagggcttcctagacacgcctggagggaaagatgagttgggactcggagcggctggttcctcctgcgccccttccttctgtagccttcctcactagggtttccagcgtccttgtttttttctcattctgtatttgtgtccccagggcccccatcttcccctcatcttttcttcttgcgtgggctagcccgagggtaaggctcccaacagctcacctggtgccctgactttgtataaggaaaagctacggcttcctcacctgacaccagtagctgcagggggtcactgggttccgaccacacgtatggggtgttgttttcatagccgtagcatctgaatgtacccctgttgctgaaggtcagggggcccatggggaacagggcctggaactttccatggttgtgttggtgtgagttcagggtccaggagagcctgtggtctccttcctcaatcagagtgaacctgcccagtcccagccgtgaggcacaccggagggtcacgttcactcctgaggtcaccacagggcttggcagtgcggacagggtgggtctgctgtaggctttcaagagaaaaaaaggcagccgtgtttaaatggggctcacacctcccaccttatcctacaaggctgggctgtgagaagggagacccctcgagagctgagagccgacccccttcccgagggcagagcctggggctgggacccctgagtgtcctctcacctgtcaccaccagctccagggggtcgctgggctctgaccagcctgcagggctctgatagtaacagtgatatcgccctgcatgttcccacatcatggatgggatggagagtttgaccttgttttcagactccagtgtttttaatatgtgcctcgacattgagtttccctctttatccagacggtacccctgggcctccagggtgccctgacaccagatggtcacggggttatgccaggtgatcacgggacctggctcggcccacaggatgggtttgagtaggttttctggaaggaaattacaggttaggtcccaagatgtcctcaaccctcagatcccagctctcagccccaggacccccctcatccccatcagtcagcccagaactgctgtcttcacccccagctgcccaggggtggtcccttgtccccagagaggaggagggacctaggacagctggggacagactcacctgcctgcacccgggtcctggggcccaggctcagccctggaagagagttccctgtgagagatttgcctccgaagcctgagcaggtcttcttcttttccttgagcccctgggatgccctaattgactaaggcatggctatggattggggtctctctcctagactagggtctctcctccccctcttaagatctcaccaaagaagagcaggcttgtgagaatgagggtcatggcatctcctcctcctggccctggctgtgcaggcaggtgtggccacggtgcccgtagacacagacagacacatggtgtgcgggcacacggaggctgggtcctccccatcacgaggttgtcccatcagcacaccgacagaaagaggaactgcccctccccaggaccctggctctcatttcccagggcttgtcctgggggtgagcaccaggctctctgccgatatttcagacacaaatggggattcacaagggggtcgttaagaaggacattttcggccgggcgctgtggctcacagctgtcatcccagcactttgggaggccaaggtgggtggatcacttgaggtcaggagttcgagaccagcctggccaacatggcaaaaccccgtgtctactaaaaatacaaaaatgagccggtcgtggtggcacatgcctgttatcccagctactcgggaggctaaggcgggagaatcacttgaactccggaggcagaggctgcagtgagccgagatcacgccattgccttccagcctgggcaacaagaacaaaactctatctcaaaaaaaaaaaaaaaaaaggacgtttccatctctgtgtggcacagaaaaggaagtccagggtcctcacagacagggaggaacctagggctccaggtgaaagtgagacgctgtggctgcccctcttctgtgtttgcacatgggcactgccatctctctgcttccttgtgggagccatgaggggcagaaagaggaactgcccctccccaggagcttggctctcatttccccagggcttgtcctgggcgtgaacaccaggctctctagagatattacagacagaaatgggctctcccctcactttggctgcgtctatctaatctgtcctcatctcaccaagggccaggatgtagcagcaaacagacccggtgccttcttgattcagccccttccaggtgagagggactgatggttcctccttccctctcagagcctccccatggaggaggctccatctcccctgtgtgtgtgtgaaaaacaggctgtctgtggtattgtcacacctggacatctgtcccacacgtgagtgggaggtcacattggactccgccttgccagccacaactttgggcagatgctaagtttggaagagttgatgctcctggacaggagcagctgtaaccacccgctctggacaggcctgatttctgagtcgtctctgggagaaatgttctttgtaagatcatgtgcatgggggtagatggacagcatgcagtgtatttgagaagagatagacaactagaaattatgtaggcagatgtggctgtggtgaaaatagtaggtagaattaacacacttaaaaatcaattctatggccgggcacggtggctcgcacctgtaatcccagcactttgggaggcccaggcgggcagatcacttgaggtcaggagttcaagaccagcctggccaacatggtgaaaccccgtctctatactaaaaataacaaaaattaggctcatttttgaatccccttaaacattaccagcccctaaatgtctgctctatggattcttctttgaattcagtattaacatctttcccgttccctcgttaatagtaagctaaataaaaacttgtgtccattttatccttctagaagagcaatttttttttacctttttgaaaaaaaaaactttaccaaaatatatttaagatcaagaatgctggtcataagctgtgaaaatctatgtcttgtcttaatcattccatcagcataaaaaatgtagcaatgcatgtgaagtgttggttccaggcaaacctgcttaagactcaatgttcaaggttgttattaggtgggggccatataggcataatggtcagtcacagggaaaccagggaaaagctgctgttcatcagcatttttttttttttacaaactcatcaacagtgagctacattgtttgcggaaatggcctagtcaagacacagtagaattcagtgctgcagtcacacaacaccagcttatctcttaggaacatagggaacattccaggagccatgtttaggaactagatgccagctaaggaccaactttacaagcaaactctcccaacgttatcacccttgcagctgtgagattaactcgttcttgcacaccctgtacctgaaaaaaataatagtcctcttgaatgcagcagcaccttgttcacccggaacatgcctccgctcctccagattcttcccgccctatctcagtttttttctgcagattctccaaggttctgcaaactgtaagcagtaaatccacactcaacttgagttttcatgagggaagccgtctggggccttctctggctgtgctgagcctgaacgagcatcccccagaggccaccgggatcaacacagcatggtcattgggatgagattctccatggcagaggctggaggggcgtggtcagtagacagaatggagcatttgctgagggctagactggccacactcacctcggaagccctggatgggtgtttacacatctacactctggaaaggggagtcccagttattcctcactatgggtctatacttggtggaggttggttgagaggatcagggactctgtatgcgtctgttctcactctgctatgaagaactacccaagactgggtaatttataagaaaagacgtttaattgactcacagttccatatgtctggggaggcctcatgaaacttacaatcatggtggaaggcacctcttattgggcggcaggagagagaatgagagtggagcgaagggggaagccccttataaaaccattagatctcatgagaactcactcattatcacgagaacagtacaggggaaaccgcccccatgattcaataatctccacctggtcctgcccttgacatgtggggattattataatccaaggtgggatttgggtggagacacagaaccgaaccatatcagacacctatgaataagaatgaggtggggcatgagtagccagaccaccattgtatcccccgaccagggcgtataacccaccattgtatcccccgaccagggcacgtaacccaccattgtatcctccccacctccagggcatgtaacccaccactgtatccccccaccagggtgtgtaacccaccattttatccccctcagggtgtgtaacccaccattgtatccccctccagggcctgtaacccactatgccctggctccttcacaactctcctcccttctcatgggagaattgtatgagatccttgctgaccccaactcccagcttgggcttagaaccctatggtcccttcctcaaatatgttcaggttcctgggccttgttgaagtcacagacaacttctcagctgcagagatattgcgggtttggttttacaacaactcagggacagaggacaaaaatctccaacctctggaatgcttaactctgctattccctggtctcagattagtcccaaaattagttaaacctaagcctcacgctttgacctctagtaatgcgtcagctgtcagtatggaatccatagatctgcatgtggggctcctggtgtcccagggccaggaatatgaagcagccaaaggctgtgactgccttttcttttctttctttctttctttttttttctgagatggagtctcgctctgttgcccaggctggagtgcagtggtgcaatctcagctcactgcaagctccgcatcccggggtcacgccattctcctgcctc[134 bp omitted]tgcctcccaaagtgctgggattacaggtgtgagccactgtgcctggccttattttttttttggtcagggagtcttgctctgtcgcccaggctggagtgcggtggtgcgatctcagctcactgcaacctccgcctcccgggttcaagcgattctgctgcctcagcctcctgagtagctgggactacaggcatgtgccaccatgcctgactaattttctgtatttttagtacagatgggacttcatgttagccaggatggtctcgatctcctgaccccattatccgcttgcctcggccccccaaagtgctgggattacaggcctgagcccggcccccttttctttttttgtacctcactcagctctctgcattctctggttcaacttaatagtactactaataacccaagtaataatctcactattcttctgtccatttatctgttttgttttacaattaatgagagaatagtcatagattccaagtaactttttcaggaataagaaacactatagtgaacaaaacctcccattgttcattcaatttgtaatagaaatggagaaagtcagatgaattaagcaaaaatacaaaagagatgaactattatttaaaaacaacacacagaggcataaatgcacaaaatttaagccacctagaggtcttgaatgtgtgttgcccttataaaaaaaaaaaaaaacagtgccagcctggccaacatggcgaaaccccatctctactaaaaacacaaaaattagttgggtctggtggtgtgcacctgtaatcccagctactcaggaggctgaggcaggagaatcgcttgaatccaggagggagagattgcagtgagccgagatcttgccactgcactccatgctgggtgacagagggagactctgttaaaaaacaaaacaaaaacaaacaaacaaaaaaaagcagtgagtactaggggcaaagatcacttaacccagtttgtcattaaaaaaaatgtttttgaggatgtgacaggttaggtaaagactgaacaatgagcaagaggaggatccagaaaggtaatattgcccaacataggagcagatgattgcggtattttgataccagaaaatgcagaaatgttcctagtgtgtctaaaatgtatatgagaatgaggaaacggaaaaagtggtacagagctgtatttccagatgtgcaaacagacgtatgaacatcgacatgtgcaatcaattgttaactgaaaatcaatacagaaataaagtgagaaataaaaacacttatctgcaatacagccatgagtctcagagcacggcgtgtggagaaatgtacatacacggggtgtctctgagaggaaacagaataaagaggtacttgattgcctctggagatggaaattgagaagatgggagcaaggatcacctctatgcccgttggtaaatatatgtttgtgtgtgtgtttcttttttttgagggaacaaggatcacctgtgtgcccactggtaaatatatttgtgtgtgagttttttgttttgttttgtttttgttgttgttgttgtttgtttgtttttttagatgaagtctgactcttattgcccaggctggagtgcagtggtgtagcgcgatcttggctcactgcaacctctgcctcccaggttcaagtgcttctcctgcct[133 bp omitted]tttggcttcccaaagtgctgggattacaggcatgagtgagcccgcacccggcctgtatttttttgtttgtttgttttttttcagtagagatggggtttca[143 bp omitted]tcttttcttcaag[134 bp omitted]ggccaagaaggtgaaaccccgtctctcctaaaaatatgaaaagtagccaggcgtggtggcgggcacctgtaatcccagcttctggggaggctgagggagataattgcttgagctcagga[135 bp omitted]gaccagaggctgggcgcggtgtctcgtgcctgtaatcccagcaacttgggaggccgag[267 bp omitted]cacacaaaaacaaatccagaccagcagtgattttccctaaaatgagaatcctgagataggagcttccgtactcatcacaattggagtcaactttcacgcagacctcaaggtgtccaagtactttccatataagtgttgctgctaaaaataaaataataataatacaaactccaggcctcttggattctaaaaatgggagttgtgtatctcttttttctccaaatttagcctggcctctcatgcttgagttgtctacagcagcttccatgagttcccagtgtggttgaaatcataaatatgccttctctttcatttccctttttcacatccccaaacccacgtggtggttcagctggggagctatatttccttggggaggaaagtagcacagtgggtgtcatacccaggggagattaactttcgggtcctgtagttgcccctaccagggtgagaacctggtgctcatagaaacctgctcagaaaatcgctttcttgcttttgttccttcctccacacaatggccacagttactggtggagacaaaatgtctggagtggactggagtccaagaaaaggtacatcgggcatttcctcgcctaggaagtcactggcacagaagttcagaaatgagcgagattttgaaaacaagaataggccgggtgcggtgtctcacgcctggaatcccagcactttgggaggccgaggcaggcacatcctctgaggtcaggagttcaagaccagcctggtcaacatgggaaaaccctgtctctaccaaaaataaaaaaaaattagccgggcgtgatggtgcagggctgtaatcccagctactctagaggctgagatggcagatctcttgaaccctggaggtggaggctgcagtgagccgagatcgcgccactgcactccagcctggtagacagagcaagactccgtctcaaataaataaataaataaataaataattaaaacataaaaaaataaaaattttctcggggagctgactatgagaaggcagaaatatgttaatatctccaggtgtctgtctggggtgtggtgggtgggaaaaaggcggaagtggtttcctgtaatgaatttgctctgtaggaaggagccatgttttttggcgctggggatgttaacttagtcctggtcatcaacaacatgaacatcaggcagagatacttgtgtcttacttggaggaagattcagacccggagaaggattttgatcagggaagagtcagctacagataaggttggggctatgagaataatagatgtcagcctggagtgagggtttggagaagaggaccaggaggaggctgatgtggtggcacagacaggctgtcttcagtctccagtgagcttgcactgtgggaatggacccggggacgtgggtgaggagggctcaagggtacaactgcttggatttgttcactgtatgtgaaacaaaagtgagtgagcaactagggtctgtttcactctctgccttagtttactggaggaacgaatggtgtcatcccaggatgaatgatcccggggaagaaccaggctagggagatatttataaggctgttcacggagtgcagaggaagcactgtctccctcctggccctgctgtctagttttgtttctcccaagcacttcttccctccgactttcttaattctataagtagcagcaccagaacgcgatcatgtctgttgcagagatgtgaatggagctggaggtcattatccttagtaaacaaacacaggaacagaaaaccaaataccacatgttctcacttataagtgggaactccatcaaatctccaagtcatttacaacctcttcttcccctgtccataactcttcatttgataccgtgaattctgtctccatgctttgggccaaagcattcactggaagaaattcccaagctttggtttaaggcatgagggttcatacttactgtcagttgaccttcagcaggtgacatcctcccctgccccatccattttcctcgttgtaggaagatggtaattaaccctcccgtcaagtttttttgttttgttttttgtttttttttttcctgacagcgtctcatgctgtcacccaggctggagtgcaatggcacgatctctgctcactgcaaccttgacttcttgggttcaagcgattctcctgcctcagcctcctgggtagctgggattacaggcatgcaccactgccaagcgtgtccatgtgaagagaccagcaaacaggctttgtatgagcaataaagcttttaattcacctgggtgcaggtggactgagtctgagaaaggagtcagcgaagggagatggggaaggggttgctttataggagttgggtaggtgatggaaaattacggtaaaaggtggtcatctattgttggcagaggaggaggtcacaaggtacctggtggggacatcgtaagacttattatccagaagaagaatgtcacaaagttgattgatcggttaaggtggggcagggacaagtcacaatggtggaatgtcgtaatgttggttaatcagttaaggcaggaactggctgttttacttcttttgtggtttttcggctgccccagacttcttggctccttcaggccatctgggtgtatatgtgcaggtcacaggggttacaatagctgagcttcagctcagaggcctgacaaccaccacactggccaattttctttttttttaaatttttagtagagacagggtttcaccat[138 bp omitted]catgcagaagagattaaataaaattagacggatataattgtgtcttgtttcttgttttggtttagaaatataagtgtattttcttgaatagatatgatgcaaaaatatttttaaatataactcataaacttaaagataaaacctaaagaaaaagaaaatgcggtaaaacaggtgggaggggaagcaggaaaggcaggcacactcgtgtaactatgattgaaagaaaatctgtatacaagtggacctgcacagttcaaacctgtggagttcaaagctcaactgtatgttactgcaaatgattataagtgctgttatagaaacattcaaagaccagaaaaggaccacaatggctgaccacacatagccaggaagagcttctcccaccgagagaccaggccatcaagaagaccagaatgctctgggcagatcttctgaaagagggcgctgagggtggatggagagaggacacagatcctgaggatggatggagggaggacacagatcctgaggatgcatggagggaggacacagatcctgaggatggatggagggaggaaacagatcctgagggtggatggatggatggaggacacagatcctgagggtggatggatggagggaggacacagatcctgagggtggatggagggaggacacagatcctgaggatggatgaagggaggacacagatcctgagggtggatggagggaggacacagatcctgaggatgcgtggagggaggacacagatcctgaggatggatggagggaggacgtagatcctgagggtggatggagggaggacgcagatcctgagggtggatggatggaggacgcagatcctgaggatggatggagggaggatgcagatcctgagggtggacggatggagggaggacacagatcctgaggatggatggagggaggacacagatcctgaggatggatggagggaggacgcagatcctgaggatggatggagggaggacgcagatcctgagggtggatggagggaggacgcagatcctgaggatggatggagggaggacgcagatcctgaggatggatggagggaggacacagatcctgaggatgcatggagggaggacacagatcctgagggtggatggagggaggacacagatcctgaggatggatggagggaggacacagatcctgaggatgcatggagggagcacacagaccctgagggtggatggatggaggacgcagatcctgaggatggatggagggaggacacagatcctgaggatgcatggagggaggacaccacgcccggctaatttttgtctttttaatagagatggggtttcaccatg[137 bp omitted]atctgaaatgtaaatggtttttaaagaattcaaattaggattcatcaaaaataggactgtctttattgttgaaaaacattgtatttctttaataatgaacaacttattaagttatgatgtgatttaactggtatgaaaatttgggaaattagaatcttggtaaagtacagattagttaaaagaaaaagatgctttagaaaaatcaaagacatttccgaaagaatgtacaataatcaatagcagtttggccccagtgttatagaggatggggagaaggtggaagaatgagaaaataacacgcatttcacgtagtatatgtgcacaaatctttttcttttgttgcgaagaaaatgttttatcacaacaaatgtaataaatttagcaactttgttctggagatcaatcaataaatccaaataggagaaggaggaggggtctgtaaaagcagaaagcaatttcagaaatgaatatatatagtgtactaaataaattgagctggatggtaaataaaggcaacaagaaaatatctgtgaatcctagaccagctgtgatgatggctctgtatgcccttaaataacggcaataattcatgaaaaaataaagaccttgtcctttctttatcaaagtgatttattatttatttatttatttatttatttatttatttattttttagagacagagtctcgctctgtcacacccaggctggagtgcagtggctcgatctcagctcactgcaagctccacttcctgggttcacgccattctcctgcctcagcctcccgagtagctgggactacaggcacctgccacc[184 bp omitted]aggcacattttacttcttggaacggcaacaggaaaattcccatcccgcagctctcacaactcagatcttagcaattggaacagaacaggttgtcactgctgaaggaccaagcagaacaacggtttcaggaagctttagctctaaatcccagtagatgtagagcaggtgcagagctctggggactctcaaagcacttttaactctggttaagtgtcagaattgcatttagacatcaacacatttatattccttgattctttcttctccctaagccttaaacatatagtcaccttttatcaaaaagatattttatttgtctaaatggaagatatagtttactttcttcacacagatgccagaaattttctatgaacgtaaaatctttggtgcaatcaagtgcatactgcttcccagatcctacaagaaaggagattaaggtgtagaattttacactcatcacagaaagttttcagagactaactggcatcaccaaccaaaacacaacatgctatcaccacaactatttttaaatgtcttaagtagtagtttccattggacagcaggtgtgtaagcaggagccaagagtgaaacacgctcttgctcctcttcctagcaagagagcaaagactgtgaggtttggtgtattcatccagagagagtgttttaaatggggctatgacagagaaggtagacgaggtgttgggcagccctggacaccctcagaaaatatcccttcttcatgaatttattttctatgttcagttttacactaaaaggtaaaaaaaagttaaaaaaaagaaaaaaaaagtccaccctatagtttgtataacaaacattctcacttgttcatgctgtattcaacgtcgagcccattttctttcccctactacaaaatcccaccgctggggtcctggtacctacagtgatggttctgaataaagccctccttactctgctttgataaaggtcaccgggtaatctttctctcaacgccttgcccagctggcccagggctccaagaaagggaaggccagacccctggcctctgccctggttactcacagggacatctgtgaatatctgctgctgccccatctggccccggtgaggctgctcctccctttcacgttgggccccactgcagcctcctggtgttcaccgccagggcacaccccaggggaactggggtgggatcataagcacagggtaggccctccctctctgcctggccacactgcactgccaggtgaattaaacatggctcttcccccaggtggtgcttgggggcccgtgcagcaggagggacatcttctccgcacagcaatgttcccagatctcaccaccctgagttctggcccctgcgttgggcgggttggcaagtcaagagaaaaaacaagcccctgcatctaattttctgtcttctctctgggcccttcctctttccactaatatgtcaagaaataacagtgtggtatttttgcttaatttcccctaaactctatctgtcctgctttccactgtgacctcaccacctgaacttcctggacttccttacactggagcagacactggcatctgctcagctctcctgtgctctgcaaggggtagaaaaattcacccatcctctgctatgtgcagactgtccaccttctgctatagagttcatgtacccacctgtcaacctcatagtcaaacaaacaagacgttatgggagaaaacacccagctgatggttgaaaaacaaccagagaagaaagacagagatgtagaaaaagagacaaagacggctggacgcagtggctcatgcctgtaatcccaggactttgggaggctgaggtgggcagatcacctgaggtcgggagttcaagaccagcctgagcaacatggagagccccccgtctctaacaaaaatacaaaaaattagccgtgtgtggtggtgcatgcctgtaatcccagctgctcaggaggctgaggcaggagaatcgcttgaacccgggaggcagaggttgcagtgagccaagattgtgccattgcactccagcctgggcaacaagagcgaaactccatctcaaaaaaaaaaaaaaagagagagagagacagagagacacacagtgagagagaaagacagaaagagagacagggacagagacagacagagcagggagaatgtgtcccacgtgaagaacagggaaaatcggtcacaatgttcacacaagaaagcaaagatacagagtacagcactgggaagcagatcccaggaggaaattaaacctgagcacaaatagaaaattaaagctcagtacaaattaaaattgggtaggccagtcaggtaccaccctctttgaaccagcacagaaacctcccagcagaccgagctgcagcccatcccggggttcataatgtggagtcaggagcctcaggtgggtctgaagcccctgtctctgagacttggccgaccttggacaggttacttcatgtctcggtccatagtttctgtttttataaatgaggaaaataatagagcacgctgtggagggtttgtaggagaatttaatgtgtccacgtttgcctagaactaaattagcaactgccccatagaaagagctggctgagtt[137 bp omitted]tccctcagcctcccgagtagctgggactacaggcacccaccacc[182 bp omitted]aatgagattctgccgcctcctagtggtacatagggtaattttctgtgtcaatcagtacatctgaccctacaggtagggtggatactcagaaatgcctcaaccaacagcaggctcagtgattccttggatttcctggggcgtgtgagtgtatgtgcatgtctgtgtgtgtgcgtgtgtgtatgcatgtgtgtgagagcatgcattcctgtgcatgtatgtgcagatgtggacctgtagggtcggctctctgccttcacccagccacacctccctcattcattcctgatacacgtgatttgtcagaaaacactgacaccaatgtgaagtcctaagatgagcaagttcagaatatctaatgtatcgtatctgtggcgatgggtgcgctgaggaattgattgtgactgtcattgcacaatgtacgtgtacgacaaattatcacattttacaccttgaatacgtacaatcctgatcaattaaattttaaaaagaaaacgctgacacgttttcgtaagtcctgtttccctcactcagctttgaacaactgtgaaggcagagagtgggtccgagagacctatgcacccaggaccaggcctggggctgccagatgtgaggccttcaaaattatttattgatgcgtggagtaaagcacaacccagagaactgggcttggctctcagctgtgtgtgtatagcacagtctcaaggctagctcttgacttctaggaaggtctttagggtcagcagggcagataattacagcaaagtctctggggtcactggaggttcacagcagacacctaggacaagcttggaggtggcatcactgctcaggaaatcggctgattggctgtagctgggcctttagaacaggcaggtgactttagctgggtctctggaaacagtcaggtgaataaagctgggtctctagaaacagccagggaactgtagctgggtctctggaaataactgagaaacagtctgtccaaggagctgctcgattgtagaagggaccacctggctaacgaaccttctggatgctggttagaaacctccagtctccagctcttgtctccaggacagctgcctggctggctttctagatgaagaggaatccaacaggaagccttccaaatggctgcttcaggcttttcctagagtgactttctaccctcaggtgcagaggccaggtgggtatggggtcagtgtctggcaacggctgcatacgtgatggactcggccatgggctttgtggactgtggggacacagcccgggctgtcctctgtgtgagggcccagtggtccagctgagcatacgtcacctcctgggaactccctgcagccagggcctaagagggagagacccagggtgagggagtgcctggtggagggtgagacgaggggctgtggggagggagggctgtggcggccatctccatgggccctgaggaccctctcctaaattgcatccgtgtgaagagccctcccacagggtattggggttggtttacgtgacaatgaacaaggcagaagggaagactcctgacttccaagctgagccaaaagacatggtgcttctgtcccctccctgccacccatccttggatccctccctctgggggaagccggctgtgtggagaggcccctgtgagaggaacagaggtttcctgcccacagccggggaagtgagcgtcttggacgtggatcctccagcccacgggagccttcggatgcacacagccctgggcgacctctcgacagcaacctcaggacaggccgtgagccggaaccgcccagctgagccactcctgaattcctaacccaaggaactgagatttttttaagctgctaaatttggggtactttaataactagtaggaaggctcaccgaggtgtccgtctctctgtccttctcaggaagtccattgactgtggccttgtcttggggagaaaatacatggtcagttttctggggaggatgtcgcaaggcaaatctgcctgagacccccacccccagcttccgatgacatcctgcacccaatgtataatacgaccttctagaatgttcccaaagattcttccccccaccccccacattgcatctggattggcaccaagtccccacttccccatcccaggcctgtccctcctcctccccctttacctgctgtcctctctagaacatcaacagccaggtcaggcctaagaggaaaaataaaagtgaacctcaggggcagcctggcggccgaggactgggtggaggtccaggagtcattcccaggggcctcacctctgctgtggcttctgctcctcgtccttgcttctggggggccctaaggacagtcggggtgtgaattaaggagaccttcttcctagcctctcctgacagcttcccaggtcaccccaccctgcccctgagacctaccctgctttatctgattctggcgatggaggcagaagaggaccaggaggaggagacagaagaggaagaccactgagaccccgatgagaatatacagatgctcagctttcaggccttgggaagcaggtgcatctaagaaagacagaaacaggatttcagcagtgtgcatttattgagcacctactgtataccacacacacgtcacgtgcgtttcatagacttactaatatataaaatatcttaggtaaataatagtcctgcagtacagggatcgttatccccttcttccaccaccggggtcctgagtgctggagtcctctgcacagggacacagactgccattggcagagcaggaatctgatcaaccccaaagcctgacctctttctccttccccaagaggcacacaccagcttcatgctccacggcccccatcactcacgctcattgtgactgttgtccgacggcctctgcgtgggtcctgggagggaggaatcagaaggaggaggagttagagtcctgagctggacagagaaggctctgagtcctcccacatccactgtggggatctcccttcactccccaggaccctgactgctccctctagaccagcaccgaccagcagagtcttctgtgatgatggaaactttctacatctactgtccagcatgagagtcacacatagctattgatatttaaatttatccaaagttgaatggcatgagaagctggctgcaccgtctgcacctccaggactcagtgaccccacgggcctgatgccatccctactggacggtgcagatacagcgcgtttcctgggcgtgaagctgtagtagacatcgctaatttctgccctctgcggatctaggcagagaccaaccacccgcaacaagaggaagggagaccttccctccctgacctccttctgggttcccaccagagggcaagaatcctcatgtctgattttatctgccctcccggcaaccctctgacggggatgtaacccgccctcctgtgggaagaatccaagtcccgatgtgctcctctttcctgaagccctgcagctagcgggcgagtgtgtggggcaccgcccaggctccctacgcagcgcattgcaggcccgcccgtcatctcctccaaccttcaccctcctctgcacagtgcacgccactacccaattcccaggtggctaaatggggtcctgaggggctcccccaaacccagggtccgagccaagcgtccctcttccaggaacagcggtccctcccctcccccggggctgaggcagcatcttcaatatccttcaagaaaggcagacattctctcttggaatgtccttccctcctgcctcgtccacggtctaaggtccaggacaccacccgttattctacaccatgacttcctgggcttggtcttcataacatttgccaccatttaaaattacatatgtattatatatgtgcaatattacagtttttatattatttatagttatatgtatcatgtattatgcaaatgtataatatataacaaatatatttttaattatgtaatcttgacatatacatataatttaatgtatataatgttaattgtatatgatttataacttataatatatgttacatatattcactataatatataatgtataatttatatttgatataaacctatgattaaatataaaatattttttctattatagttatacataatgtatacataatagataatatatttacattaatacctatatttatttattaactataacacttgaaatttattatactatatattgtaaatatatctttcatataatatataatatacactatagtcatatgtagtgatacactaacatgttttattatataattatcttccttatatatataatatatatataatatatatatatattatgatgtaaacatatataatataatttaaattataggtctgaaattctacattgcaaatcatatatttttatctgtatatgcatgtatgggaatcagtgcatttctattgctcattctaactatttctccccattgaagttcacaagacgggaggccatttctcctcattcttggtgcatcaaatccggaggcttcagtgcctggcacagtccctgtgaggacaaaatacttcctcagtattaataggagcatccctcctttggggttttctaatcagcactgatgtcagcgccgtgtgtacctgaactcaagtctgccctaaacgattctaccaggacagctcttctattgcctctgtttcacatgaggaatttgggacacaggaggtttgggtgagtcaccgtcaggcatagagccaggaggtggcagaaccaccgggatttgaaccatgaacccagcaatctggctgcaggagggtctgtcctcgtgacctttatatgtcactgcatgaaggtgagagaagagagaaggaaggagaagaagagagggagagaaacagaggcaagatattcccgcagacagaaggctaataaaaaccagacactggacttgaaccaggtctgcgggactcaggagcatgtcccgctgtgccccagcagcccaggagcctctgagggggtccggatggagcacggcatcgctcctcccacctccccatgtggcttcagcccctggtcccacctgcctgagctcacagcccgagcctcacaggcagtcaccgggtctaggtccaaggacgtactctggggatagaaacccaggtggggaaggggccgcgaatggcttatgaccccgtgtcctcccctgggagtttctggtcacagatcacagggggagatggacaacttgagacccagggacttggggcagcttcaatcccatcacagagtccagggcagagccagatggaagggaagcctcatggcttcatcctggtcaccgttcacagctacgtcccctccctgtggagccctcctcctcttaagggaccttactccaccgttcaggcctcccccggagatcacagagccaacaggagcagccccgtccctctccgggtgtcccaggttggaaggtgagttctaagtccctccatcaggtgcagagcggggtgaatggtgaggccacgcccacaagggggcagcgtggagctcgggcgagcccggaagtctggggtggggctgcccgggtgggtggcccctgccccttcatggccttgtgccgttaagcacgaaactttaatttatgttttgcatattagagaggaggaggagttagaggatcagactagtacctcccccattaagtggtgcttgcattaagtgctttccacagttcctggcatggaacaaggttgcaatcacggtaccattgctgctatggtctctgtgagcattagcgacctcccagagcttggtgggtgtcggtgccttcccgtggcctccctagaccttgactccaagcccagggcagagggctggacccggaacagcatccgcagcacagattcccctgtaatcccctccagctgagggccctgctactgaccagctgaggagccgggctctgtgtccggggagtccgggcctccagagctttctgtaaacaggggcaggagaaggatttagaacccgtcccaaccaacctgccctcctccaccctgagcccccatccaaaggccgcatgaccatcacgcaatcccagacaatgtctcgagactcctgagaaaacggggcaggggacaggaggctggggagagccccgctgcttgccccattctccctggggctggtcactccctctgctcctcccaccacaagctcttcttgacctcaggggactgctgaggtcctggagggacatgaagatgggttggatcctctccagtggactttgactccaggacatctcgggctgagcacacacaggggtgcatgtggtcacataccaaaggttttcccaaagcactgtcccgccctggtcaggggccatccctggaccctgcgttctgcccagtgggagatgaaccacaccaggagaagcacattgcctggggcaggttctggctcagtggaaaggaataagcgggaccatccatcccgtgtgaaaagacactcatcctcttgtaggggggttgccccctaatctctgggaacccactccccacccagccaagcagagccagctctgagcccaccagatgctggagctgagtgtccacgccatccgtggcgtccagaggagaccagggctccaggaacctaagcaggtgtgagggcagaggggaggtgtgtgcagaggaagaaggggaggggagggcttggggtcaggaggaggacaaggttggccacagaggacagcagctgggacagggtccagggacctggggacaagctcgagggtcgagctgagactggggcagggcccaggtgacgtcctcacctttcaccagcagctccaggtagtcactctgctcagaccatttagggggcttataatagatgcagcgataaagcccggcatttccttctcttactgagtcaatgcggaatctggcctctgactcagatggactagcttgagacacatcttcagtatcattgtatgtggatctactgtccctctccaggcggaatgtttgaaccccaaccgggccccggcacacgaaagtcacatggctccccagggggatcacggtgcctggctcagccgagatggagggtctgggcagatcttctaggagggaagcagagcaggatctcagcgtccactgtaggaagtcaccatgccacacacgtcattttagcatcacaattcagggattttagcaattttatagagttatgcagccatgaccacagcccaaccttagaacattcccacgcctcctgcaccttctacgtgcatgtgattctcatcactgcagagttttttcccagttgacagtgaggaccctgagacttgctcacaacttgggccttgctcagggtcatgtgggaagtgtcggagcagcctggagcccttcatgcctgctgcagagcccagggccactttccagagggacagagtgtgggagggaggcacaggatggggatgacagggtcattggtgaaggacaagggacagagaagcgagggctctggagatggcttgtgctggggcctgaagggcactggccggtccccgggtgggactgagtgtgggacgggggttgccaggctcctttgagggtctggtggggtgagggtgaagcccccagccctgatctgctcacagcagatgcccagcccgtgacaggtccccattgctaatgcagatctctgtggagacaccacctctgggttttcctctatagtttctactttcttctcagcctaatttgcatttccttcttattaaggctcttgaaaaaccccatttatctcaactgggcttggggtggaggaggaagggcgggtttgacgccctgaaacaggaaggttgtgtcaaaattagcaaaatccctgagcggggcagagagctggcagggcttcaattcactcgtcccgtcttcattcattccttattattgacaaattaaaactgcatgtatttaaggtgtacaacatgatgttttgatacaggtatacactgtggaatcgctgaatcaagctaattaatataacctcactttgcgtagttaattgttgtggtgagaacatttaaaatctgccctcttagtgattttcaagcatatgatacattgtgattaactctagtcattgtgttgcacaatcctgaacttactcttcctgtctagacgaaattttctatcctttgaccagcatctccccaaacccacccatttgttcatttttctttcttttaaccatatctcagttacttatcaatctgtttaaagacgtttttcatgggctgctaattccacaaatgtgagaaacacacacaggatgcctgccgtttggaggtggacttccagaagggaggaccggtattgatcaaagaattgtccaaatctgcagctgtgaactgacagagtcttgctctgtcacccaggatggagtgcagtggcgcgatctcagctcactgcaacctccgcctccaaggttcaagcaattctcctgcctcagcctcctgagtagctgggattacaggtgcactccaccacgcccagctaatttttgtatttttagtagagacggggtttcccccatgttgtccaggctggtctcaaacttctgacctcaagtgatccacccacctccgcctcccaaagtgctgggattacagatgtgagccaccgcacccagcctcattggtcatttttaaaatgaattattttttttcaaaatcagcatgtgagaagaaccaccatattgagcggcatatggagtgtttgagaaagcgaaagaacctggaggaatgtagagatgagtgagccccaggtcacagggacaggatgtggctgggaaaatgggcatgtccagaccaaagagaggtgcacaggtctgattctatctgaagataaacaggggaagggctctgagaaaaaaaaaaaaagatttcatcttacgatgagatattaaatgaaaatttttgaatacaatttaaaaactgtggaaagtacaatggtcatggttgtgcttttgcaaatcgccagtccctggggtcaggaagggagcaggcagcagtggcatggacaggctgaggccggcctcggggagccacggaggggagaggggctgtcacctgggggtgatgcaggaaaagtcgatgaagagagagggaaagatgagaaaaatttagagtgaaatcaccaggactgggtgacatggtgcatccaggaggatggagaagaggatgagtgttcagagtctgccctttgtgactgtcatgttccccgccaagaagctgccgagtgaagtgtgggctcgtctggggaaaagtgccgggctcagccttggttgtgttgggtttgaattctcattgtggaaatcggtgtgcggagctgacgcctgcactcccagggtgaccgcagcactactcacagccgccaagacctggcaagaacctgagtgcccaccgccaaatgaatggatgaggagaatgtgctgtgtatatgcaatggaatattattcagccctaaaaaaggaaggacattctgtcattcgcaacaacatggatgaaccagaggacgttaggctaagtgaaataagccgggcacagaaagacaattactgcgcgttctcacttatctgtggaatctaagaaaagttgatcacccggaagcagagtagaatggtggttattggaggctgcaggtgcggggcatgggagagacactgatcaaatgatacaaagtttcgagtagccaggacgagtgaatttttcagatctatggcacagcagaatgacagtagttcataataatttattgtatatttcaaaattgctaaaaggagatttaaaatattctcatcacaataagtatgtgatggggctgatatgttaatcagctttatttaatctttccacaatgtgtacatacgtcataatatcacactgtaccccgcaaattgcaattatttgtcaattaaaaataaaatttttgaaaataagaaaagcaaaataagacaggtggaggatgcgagagagaactgggtgagggttggttatgcattttacatttggaagagtttgcaatctagggtatatttaaagggatctctccaggccctctaagaatcaacatcactcccacccagcactgcccttggggtgacagaggggactgggaagatgggacgaaggcatgacttaccctcctgcgtgtggatggtctgggccaggcagagcactggaagagaagccccagtgagaaaaatgcccagtgcccagtctccttacggggctgctgtcaaaagggggctcgatggagctggggggcattcagcatttcataacgaccaagccaaccctcctcgacatcactgtctccatgtaatccttcttgctgcaaaatggtttcaagataaatcccaaagtctcctcctccaaaaaggctcctgctcccccagcccttcttaaagctgacctcatccccacacccgggcccctgtttttaggacaagatcttctctgatcagacttaggccccagggagagcagcagggcagtcttgggaggaggaggacactttcctccccagaatcttctggactagagtcaggcttgagcagggaattttccagacctcccgaccccctttccagcctcccggctgcctccaggactcacctaggcccaggagggcggtggggtggggagacatggcccaggtcccagcagtgcagcctggcctgaggcgcaccaatgcaaggacagaactctgcagcagacacaagcagacaggatgtgctgcccgggggcctcctgcctatggggcttccacagcaactgcctcacacaagaggaagagctttctgtcctgttctttccacccttcccactagtgagacgagagggagggccttggtttctgaaaaatgtcgcttaccctaaatgtcgcttagaggcagatgaccgtaaactagttaccagatgtgtcagcctctttctaaatctatgggacaaggcagaataaaggtcgggcaaccaattgacttggacgccgtcccaactccacaagttaacggtcgcagctcttgggcaagacgttacaaaactagaagctgacatttccttgtattacaaatgggagccatagaaatccttccccaagtttttaatattgtgatctatgctaaaatcccgacaaggtatttaacacgttaaaaatatcctacaaagcatattatttttttaaggagactattggtgaggatgtggagaaactggatccctcgcataccacagtaggaattaaaaattgggcaatcactatagagaacagtggggaggttcctcaaaaaattaaaaatagagctaccatatggtccagcaatcccacttctgggtctgtatttaaaagaaacaggccaggcgcagtggctcacagctgtaatcccagcacttcgggaggccggggtgggtggatcacctgaggccataaattcgagaccagcctggccaacatagtgaaaccctgtctctactaaaaatacaaaaaattagctgggtgtggtggtgggcacagctacttggaaggttgaggcaggagaatcgcttgaacccagaaggcaggggttgcagtgagctgagattgcaccattgccctccagcctgggcaacaacagcaagactctgtctaaaaaaaaaaaaaaaatcagtatgtcaaagagccgtctgaactcccctgatcactgcagcactattcgcaatagctaagacgtgaaaaccatctaaatgtccattgatagaataattgatatagaaaatgtggtgcacacacaggggaatactattcagccttaaacaaggaagaaaattctgccatgggcgacaacacggacgaaacctgaggacatcacgccaagcgacgcagaggcagagaccaagtactgcatgatgtcacttacaggagatctgcaaagtcaccagagtcacaacatcacagcagggaatggtggttacgggggctgggaggagggggaaatggggagttattaacaaacaggcctagagatctgctgcaccacatacgacccatcgtcagcaataacgtcttgttcacttgaaatttgttaacggaatagacctcatgttatttggagggcccggaggaagacaggaagagaagggaatgtttgaaacttcttagagatggattaaatggttgtgaccaaaatgctgatagtgatgtgaacagcgaagtccaggctgacaaggtctcagctggaaataaggatcttacttggaactagagcgaaagccacctttgttacgccttagcaaacaacgtggctgcattctgtccatgccctagagataccacgccagggtgtctggcggaagaaatttcttttctttttttttaaacggagtctcgctctgttgcccaggctggagtgaagcagtgcgatctcggctccctgcaacctctgcctcccagattcaagccattctcctgcctcagcctcccgattagctgggactacaggcacccaccac[179 bp omitted]aagtggcatggcttcttgtaccaacctaggctcagatgtgggagcaaagaaattacctaaaggtagagtttatatttaaaagagaagcaaagtgtaaaagttcgaaaaatttgcggactagccacatggtagaaaagaaaagtccgttttcaggggaggaattcaagtaggctgctgggcaacgacttgctggagaaatttgcataactaagagggagtcacgtgctgtaccaaaacatctcatctaccccataaatatatacacctactatgtatacacaaaaattaaaaatttaaaaacatatatagtgacatgagatgtagtgtgaaatgtcattaaaagatgagtttgcatcagaatagtccaaacgtttcaaaaacattccagcatgatcactgccttgctgaccagtcttcctcctgagacgtggtgacagtaatgatcacaaacttggatctcgtggacagacaggggaattcaagctaaaccctggtcctcaaagagttctgcatgttacagtccctggtatatccttccaatctaatccaattttctgtgagtccataagacagcaatccatctaaaaaataacaataaaccaactaaaactgcttaatataatatgttaaagattttttaggccgggtgcaatggct[168 bp omitted]gaggcaggagaatggtgggaacccgggaggcggaggctgcagtgagccgagatcgtgccattgcactccag[145 bp omitted]cccgggttcacgccattctcctgcctc[224 bp omitted]gctatgcagtcaaaagttaaagaaagatggagtccccagcctcaagctgaatactgaacctggagctcaccttgatgatgatgaattaactgagctttattttcatggttttgtaaatcatgaggacaaggataaagtgcaggggtacagattccaaaagcttccacctcatcataagaatgatttcaaatcactcaccaacttctcatggttgcaaggaatactacatttgttttgaaacttagcattgaacatgaggccaaaacacagtggctcctgagaatgactttcctgcttctgactcttcttttactggcataatggtttctatgcattagattatcctccctgcctcttttcactttaggtcttcattagtgatttttattcagctttatcaaaggatcctttgcacacaaactgcatccacttaatctgtgcaattcagtgaattctgacagctgtgaaaccaccaacatatccaagattttcttcactgctcagaagattcctcatgctcctttgcctccatgtggccactggttcctttttgatatgtatttgttgactgatttatttatttatttatttatttatatatttattttgagactgagtttcactcttgttgcccaggctggagtgtaatggtgcaatcttggctcccgggttcaagcgattctcctgtctcggcctcctgagtagctgggattacaggtgcgcaccaccatgcccagctaattttgtatttttagtagagacggggtttctccatgttggtcaagctggtctcgaactcccgacctcaggtgatccgcccaccttggcatcccaaagtgctgagattacaggcgtgagccactgcacccggccgactaattcattttttaaacacacttcttacctgggaataaatttaaacttgcaaaagagttgcagaggtacagagagttcccatatgcccttcatccaggtccctctaatgttcatgctttacacgaccccagcacatccgccaaaaaaaaaaaaaaattaacactggtacaataattaactgacaggctttctttggatttcatcatctttccactaacgttctttgcctgtgctgggatccaatgcaggggcaccgtcctgcatttacttccctctctgttaactgcagagaagggtttctgttttcctggttggaccctgattaatattcccctagtatctgaactccaggtgcccaggaaggttggggggcaaggatgtgctgcccactggggaaggagtggctggcagaatcgacatccgtctgttcctccacaatccaaggtcacagaacacatgggcagttattctgggtttttccataagaagggtgatacagagctgtcgttgttccatattatgaggacccctccacctttgcattcctctaagacctttcctctgagactctcctccaagctggagaagacaagctacatgcttatgtccaaggcatgctgcagattcagcatggcacagctccctcactcaaaaacgttacttgatgtgggatgcacaggcatagagtagtgattctcacactagactcagatacatacacaatatttgcaacttaaattaaacaccaattaaatgtcaagtggaaagacaacatctacagaaataaaatgacacaagatgcaatgtgaaatgtcattaaaagaagagtttgcattagaatagttcaaatatttcaaaactattccagcacgtcactgcgttgctgacctatcttcctcctgagatgtggtcgccgtaatgatctcaagcttggacctcgtggacagactggggaactcaagctaaaccccggtcctcacagttcagcacgttgcaatcctgtgtcgttccgtccaatctaatccaatctcaaggaccccagttcctgagcaaccctggcttggctcggccaaagggaagcgtctacagaatctgagtctagaatgcccggaggtctgtacttcttgctgttttcaggagattcaactgcaaagccctccccaagtcatccacattggctcacgtttctgtgccccacccttcctgcctgggaggacccttcttgttcagccaaaaaagcaacctgagggtggtgtggtagcagggactcacccatttctctttccatcttctgtcgcggatgcaaccctggaaggaagacctcaggacgatgatcatcttcataggattcccgacctgtgcctggctttgtcctgaatattagccttggcagcctggcctgggctccgatggtggatgaacttggctttccacgggctgccacctccagcctgcgctgtggagagaccaggtcctcggaacagtattttaaccttgtcctcctttcccttccagggtttaccaagacatagcgggtgtcatagatgtgaaaaagcttctgctataccagggtcaggaacggagcaaaactgaaaaccgcacaggatgtggtctgccaggtgccagcatcacagctcaaatccttaagaagctccagccgcaggcacggaaataaacagcttctccctgccctgtatacgtctccgattttacccaggatggggctgaggaagcaacacagattcccaaacgttacttttttttttttattttgcttgagagccaaggcaatattagacaagccttactccctaattagtgcctgacaagaaccatatctctgtcccaatccttctattcaaagtaggcacaatttgcttttaccaaatgtaaaactcatgtcaaagccatgctgtgagtatttacaccagagaaatcggcaaatgctacacgtcggggttgttttttgtttttctttttgctttttttttcagagagctgattgtcaagactttaccagcacactgctggtaaatttccaaaggccaatttaaagaaatttttttaacagaacatgtaaaaaaaaatcaacgtgaagtcaacatgctccagggaaatcagacaattgataaagcatgtctatttctgtagtgtatactccagcctgtttccccctcctacctcaggtaccgtaaccagcatctgaagtcttatattcaaatttcccttgcacttttgtaaatatagtgttctctcatcgatgtacctatttggtgtgtatgtatatgtgtgtgtatatatatatatgctatcatttaaaaattgtatttatttatttaaggtgggtcaccgaggctggagtgcaatggtgcaatctcagctcactgcagcctccacttcccaggctccagcgatcctcctgcctcagccttctgagtagctgggattataagggtgtgaccccatacccagctaatttttgtatgtttagtagagatggggtttcgccatgttgaccaggctggtcttgaactcctgccctcaggtgatctgcccgcctcagcctcccaaagtgctggaattacaggcatgagctactgtgcccagcctcgtttttaattttagtgcaaagtatagttttcaaaacaatgtttgcaatgtcatcaaatatagaatgagcacgcatcaatgtcttcttaattcattaatgatgaaatcatcattcaaaattcctgtctttacccaaatatttagcttcttctgttgctcttcatttgttcctgcgtttctccatttccactgggatgatttcctcttgtccaagccttttattctggcaaccaatgaactttacactctttctatagttttgccttttccagaatgtcacatagttggaatcagacagtggatacgccatttgggcgggcttatttcgtgtagtgatatacattgaactctcctccacatcttttcatgacttgagagcttgtgtcttcttagcatgggataatattccattgtctggacacatagttaatccactcacttactgaagggcatcttggttgcttccaagtttgggcgattatgaataaagctactgtaaagatccatatgaccgtatgttttcagctcccttcggtaaatatcaaggaatgcaattgctggattacatggcaaagctatatttagttttagaagaaattgccgcactgtctcccaaagtggctgtaccatttggcaatcccaccagcaatgaatgagagttcccgttgctccacatcctcgccagtaggccagtatgtggtattgtctgcgttttagaatttggccactctaataggtgtgtcgtggtaacttggttcctaagatactgatagaggtgcagaacaccagctgggaagtcagccagaatgagcttctcctgtgacttcctgtcccacagcctcagagaactttgacaagccacttcccctataaacttgtctttctttctttctttttttttttttttttgagatgaagtctcactctgtcacccaggctggagtgcaatggcatgatcttggctcactgcaacctccgcctcccgggttcaagtgattctcatgcctcagcctcgtgagtaactgggattacaggcatgcaccaccacacccagataattttgtatttttagtacagacggggtttcaccatgctgaccaggctggtctcggactcctgacctcgtgatctgcccacctcagccttttaaagtgctgggattataggtgtaagccactgagcccggcctccttataaacttctctaaatctaaatttgtgaatattctttctttaaaagtcgatcaactggcctggcacagtggctcatgcctgtaataccagcattttggaaggtcgaggcggatggatcacttgaggtcaggagttcgagtccagcctggccaacctggtgaaaccccatctctactaaaaatacaaaattagaggggcatagtggcgggcgcctgtaatcccagctgcttgggaggctgagaggcaggagaattgcttgaacccaggaggtagaggttgcagtgagccgaaatcgcaccactgcactccagcctgggcaacaggagcg[138 bp omitted]ggtgaaaccccatctctactaaaaaaatacaaaaagttagctgggcgtggtggcgggcacctgtagtcccagctacttgggaggctgaggcaggaaaatggcatgaacccgggaggcggagcttgcagtgagccgagatcgcgccactgcactccagccagggtgacagagcgagactccgtctcaaaaataaataaataaataaaataaataagtcgatagaccaatatttatcaattacctcttatacgcttggtgtttgagattcaggaatgaacaaaacagatccagtccctgccctcaacctagctcttagtgtaatgattatgggaacagggtcaaatagcaaatcacaaattatttcacgactattgtgagacaagagtgagagccaagagtggtggtgcacacctgtaatcccagctcgaaccagggagacagaggttgcagtgagccgagatcgcaccaatggcttaacacaatgggatttggcttttcactcatgtaaatgaccagtgcggttttctctggggcagaatttgaattttctccccaggatgactcagggacacccgcttcctccattgtgctcccatcatgcccttgggcaatggcgtcccgtacttcaaacagcaagaaagaaggagaaacagaatatatctgtgcacttgcaaaatttgctgacacatgtcatttctgtccagaattgttggctataaatagtgttatgaacagtcacacaatgatgcaacaagaccagggaaaaagtcccttggtgggggtagccacttcccagaggttccaatgcttgcactgtaagggtaagtacagaattttttttttttctggtgagcagccacatatttctgcctcacgtgaaaaataatctcaagaagaaatgtacctgagaatgtatagcccaggagcatgatgttgtgacacctgattgatggaccatgtggggtgattgactcccctgtacttagaaggaaatcaaaaccaaaggttcaagtaatattaaagagaaacattgtcatattccctctggaacccatgcacgtcttagctaacctgcagagaggagtagaaaccactagaactgaaggaggcagctctgtgcaagggtgacggccttctcccctcccagttcccttagttctggagttcgatgaaggacggggtccacacggcccactccgtttcctctttctctgaaccgggggtgcagaacctgaacccagacaacccctgggtatgagtccggccccagatcacagctgtggttttggctgccgcagtgaccttggcaaagtcctgagtcgtttgctgttgtgggtatgatggacagctgcgacgttttcctggactcccactgaaatctttaacttcaagatcatcttctccatcccaacagaactcatcaggcccagaaggctcccagccccagaggttcccagagctcttcaggtggaatgttgagtctgcacaagccaggatggtgactctggagaagttctccagaaaagaatcagcatctagagtctcctgagttccaggcccttagaaatttagactccagaaccactgccaaagtgaccccctcagcccagcccttcggtacccagcatccactgtcctcagcccagcccttccgtacccagcatccactgtcctggtgggagtccgctgtgctgctccaagaagacagaccctcaccattaccggaaagactgaccctcctgtgtccaggtcctgtggcccagactcagctctggaagagaaatctggatttacaatgctcagtacgtcgctcaaaatctgcactcgatgacgtctgtaagctcttggtcccagcctgggctgcgaagcctgaggcttgggcagacaatgccgtcccgccgtcatctctgctccctcttcgatcgctaagctcccacagcattgatctaaccagacatgggcccagggagagagctgtcttccccacctcccagccccaatccctcaatccctcgcctgccgtgccaagactggtcaagggaaagtccaggaagaaagcatggtaaggggcaccgtgctgcctgcgcccgccccgctgtgcagaatgcagaggctcaggatgcggtgcgcagagactcagtcccaaccgtcttgtggcttcttaccacgtatctcccaggaagtcaccatgaggcttagttcttccttcctgtgactggggtaaaggagagaactgtctccttggacatcatcatccatacgcccggcccgaacgtcatctctgacccaaacaccaaatccagacgggcaaccacggctgtggggtgtggagggggaatctgaacaccaacctggaggtcagacttgaaggagacggcgacgctgccttcgccccattcacaatatacaaccttcgatgggccacctccccagtgaggcttcatcaagggggcttggtcaacttcctttttgtgtgaacgaaaacatacgtttccaggcgcctattaagggcttgagtctgtgtcagagacgagccacacaagtcaacggacctcacagtctaatgtggagggcacacctctgactattcaaaagtcatatatagcatattaaccgtagattttaacaaattagccttgaaatacctgcagtttgtcacaatggaaggctcacttctcactgggtgacacgtccatatgggggcccccggttggcagttggagctcctccatcaggtgactcaggtgcccagattcttccaactttggggtccaacctcccctagaaccttggagtgctctgttaccagtgaggggaaagaggaagagagagtggaa[221 bp omitted]ggtgaaaccccatctctactaaaaatacaaaaaaattagccgggcatggtggcgggcacctgtagtcccagctacttgggaggctgaggcaggagaatggcgtgaacctgggaggcggagcttgcagtgagccaagatcgtgccactgcactccagcctggacgacagagcgagactccatctcaaaaaaaaaaaaaaaaaaagaggtggagaccatcctggccaacatggtgaaaccccgtctctgctaaaaatacaaaactaagctgggtgtggtggtgcacacctgtagtcccagctacttggaaggctgaggcatgagaatcacttgaacctgggagacagaggttgtagtgagccgagatcgagccactgcaccccagcctggggacagagcaagactccgtctcagaaaaaaaaaaaaatcctacgaccttgtgtgaaaaggggactcaaccctcagagctaactccagggaagccacctgcagtgtggagtggaattggggctgaggactgacgagctggcgacaggaagagcagctgggggagacgtggacggaggagacagcttctgtgaaagccctaatcaggagacaatttttcctgttgtaagttgagtggactccagatggaaaaataatacgaagaatatgtgtactgattgagcaggagtctctaaaaggccaaataaagttttggtattttaccctcaagagagtgggacaggttttgagcataagtatggcatcatcatatttttgtctaaaatgtatctgtaagaccacttcctgaagtcagaattgcacgaagcaaaaacagtaagaggtaacgttttctgagcatttactttatgccagacactgccctgagtccccagtatggatagtttacttaattttcccaacaactttggaaaggtgttttcatcactagactcattttaatgatgagaacactgaactcagaggttaattagtttgattagtgtcatgtattaacatgcataatttcatggaaggaactggatttcaacccaggaagaaagtatgtccttacctattattattattattattattattattattattattattattattgagacagagtcttgctctgtcacccaggctggagttcagtggcatgatctcggctcactgcaacctccgcctcccaggttcaagcaattctccttgtctcagcctcctgagtagctgggactacaggcgcccaccaccacgcctggctaacttttgtatttttagtagagacgaggtttcaccatgttgaccaggctgatctgcatctcctgacctcatgatccacccacctcggcctcccaaaatgctggaattacaggcgtgagccaccgcacccggccgtccttacctattattgatatatcattgtatttcttaaagaaaacaagaaaaaccaagtgtggatagaccagttaaaaagttcttgccttccaggacagtgatgatttgtttgcactggaattatcacagcaggaatttcagtaaatatgtggatttatgactgggaggtaggctcagaagaaatgctgatggaagtttggcttccagaaatatctgactaggttgttttagactaaacttctcaccgttaattaaaaaaaaaaaaaaaaaaaactttaggccaggcgcggtggctcacgcctgtaatcccatcaccttgggaggccgaggcaggcagatcatgaggtcaagagatcgagaccatcctggccaacatggtgaaaccccttctctactaaaaatacaaaaattagccaggcgtgttggtgggttcctgtagtcccagctaccctggaggctgaggcaggagaatcgcttgaacccgggaggtggagattgtagtgagccgagatcgcgccactgcactccagcctgggcaacagagtgagactccgtctcaaaaacaaaaaaaaaacaaaaaaaacaacaacaactgtaaaagatgaacaaaaaccaaagaacatctgtctgtagaacttggcatgcttccaaggcagagagaatttagggttccaagacataaaagaggaaggaaaccaagcaaggggactttatcctttgaggttagttttatgttaacggtttgctgattctgaaactaaaggcagcagatgagagaccaaaaagctgagtaggagcaggatgaagaatttcaacaaagaactagcaaatataagaacaaacacagccggacgcggtggctcacacctgtaatcccaatactttgggaggccaaggcgggtggatcacctgagcttgggggtttgagatcagcctgaccaacagggagaaaccccatctctactaaaaatacaaaattagccggactcagtggcgcatgcctgtaatcccagctactcaggaggctgaggcgggagaatcgcttgaacccaggaggcggaggttgcagtgaaccgagatggtgccactacactccagcctgggtgacagagtgagattccatctcaaaaaagaaaaagaaaaaaaaagaaaatacgggacatggtgaaaatacttaacatatgtacaactggaatcccataaggggaagaaagacagagaaagagaaaggcagacacgatattggaagggttactgaacaatatttcctaaaatgaatcaaaaacatcaagccacacagtagatgtccagtaggaacttaaacctcacgtgtttataacatgttataatataagttgcttatattcactcccaaatctcctcctcctaaggtctttcccatctcagtaaatgagaattccagccactagttatttgggcaaaaaaaaaaaataagtgttacccttgactccatgtttttcctcatatcccacagctgtgagtacattatcagacatttccctttgaaatatctccagaatagtatcatttctctccacctcttggagaccacccgagcctgaaccactgtctgctgtacctggatcattgcaagagcttcctaactaatccttcttgcatctaacattcctcctctattaatctgttctccacacagtagcagagttgtcttgtaagaagataacgattctcccaaggatcacagccaatcagacacagcaatggctgctccaagccacagggatgcctgctcatgcaccgtgccagccaagctcgtttctggagttttgggtgggtccggatgagagaagacaatagctaactttatggctgtcattctgggaaatcattcccttgagaacagagctttgtcaaaagaaggtggattctacaaaagattaagcagtaaatgactcaaaagatgatcaggcaatgggggaaaattagccaagagctgattcctatgaaatgttttattattcctgtgaaatttttgcattaatcaagaccatgaatttggaaggagcccttcttggagaagacctcttcattggaagcaatggtccctgtacaggtggctgagaggaacacaacaaaagcaacgtccaggtagagcaggaaggatgcccctcaggagcaaggagtggtcatcaggtgaaacccaaggtgtcttcttagagagtgaaggtcccgggtacctgccgccaggtcctagtgaccagcccccagagtggaagtacaagggtaatgcccagctactcacaccggggggtgatgtcctggagaaagggctgacagcagcttacctggactgctggcatcattatcacatgcatgccacatgccttcatgaaaatcaaagtctccctccaaagtgcaagtccaattccataaaataaggcatgctgatcataaaatacgatttggcaataaaatggcagtatagcaaaagcactggccactttgtgtcactccttagtatggtttggatctgtgtccccaccaaatctcatgtcgaattgtcatctccagtgttggaggtggggactggtgggaggtgattggctcatgggggtggctcctgcatgaatggtggggactggtgggaggtgactggctcatgggggtggctcctgcatgaatggtggggactggtgggaggtgattggctcatgggggtggctcctgcgtgaatggtggggactggtgggaggtgattggctcatgggggtggctcctgcgtgaatggtggggactggtgggaggtgactggctcatgggggtggctccggtatgaatggtggggactggtgggaggtgattggctcatgggggtggctccagcatgaatggtttgtcaccatccccttcggtgctgttctcacgatagtgagtgagtcctcattagatgtggttgtttaaaagtgtatggcacctctcttctctctctctctctccctcctgctccagccatgtaaagtgtttgctcctcctttgccttccaccatgactgaaagcctcctgaggcctccccagaagccaagcagaagccactgtgcttcctgtacagcttgcagaaccatgagccaattaaacttcttttctttgtaagtttcccagtgccaggtatttctttacagcaatacaagaacggactaatacagaaaattggcacccaggatggactaatacactcttatgcccaaaagcgttccagaacttcccaccaaggtcatattgacaagactttgcatcttctctcccccacccacctcttggcttagcactctgattgtatctcctcccactttccccttcgtgaccctgatccagccacatggacatccttgctgttcctagaatacaccaagcatgcatctgcctcaggacctttgcatgtgccatgctttctgcctggaacactcttcccccagagatgcatggggctcactctctgcctccttcactcttgactccaatattcccttctccttcaggtcttcttggaccatcctatctaaagttgcaacactccctccagatttcatatcacctctcactgcctttttttctttcttcagcatatatcactaatcttgcatatattttatttattaatattgtttatgatctgcccccccattagaatatatctccatgaagtcatagatgttttttctgcagtgtttcctatagtgtccctgcacctaggacagtccctggcacacaatagatactcaataaatttttttgaatgaatatttgttgagtatctaaaatctctaaacttatgaatgaatagacatatacagtatataggaagtataaggaaggctacaagggcatgattactgagtacaattctagaagccagatctctagcttttaattatggttgtaccagttataagctttgtgactttagagtaagtttattaacct[146 bp omitted]cccgtctgtactaaaaatacaaaaaattagccgggcgtggttgcgcaagcctgtagttccagctactcgggaggc[137 bp omitted]cagaactcataaaatttttgtgactattcggtgagttattatgttaaaagtaatcagataggctgaggcaggagaatcgcttgaacccgggaggcagaggttgcagtgagctgagatcacgccactgcactccagcctgggtgacagagcaagactccgtcaaaaaaaaaaaaaaaaaaaaaaaattacgtaacggatacaatgtatgtcactgggttagtggatccctgaaagccctaacttcatcattctggaatctatccatgcaacaaagttacactcgtaccccataaacgtatacaaataaaaaataatcggctgcgcatggtggtttacagctgtaatcccagcactttgggaggctgaggagggcggatcacctgaggtcgggggtttgagaccagcctgaccaacagggagaaaccctgcctctactaaaaatacaaaattagctgggcgtggtagcacatgcctgtaatcccagctactcaggaggctgaggcaggagaatcgcttgaacccgggaggcagaggttgcagtgagcagagatcaaaccattgcactccagcctgggcaacgagagcaaaactccatctcaaaaaataatcataatcataatcataaatataaggcaaaagtaagcatgctttctttaaaaaaagtagtcagactgagcctgtcatctggtaagagctctaacgtttatcgttaatatgattgttattgtcgctgttatattttcattattggtgttgtcattatatgtacaaaacagcatcagcagagaatccacatccttttcaagaacaaatgaagcatttacaaaaattgatgacttattaatccacccaggaagtctcaaaatcttccaaaaacttcatataatacaaaccatgactgggcacagtggctcatgcctgtaatcccagcactttgggagaccgaggagggcggatcacctgaggtcaggagttcgagaccagcctggccaacatggcaaaaccccgtctctactaaaaacacaaaattagccgggcgtagtggtgcatgcctgtaatcccagctacttgggaggctgaggcaggagaattgcttgaactcgggaggtggaggttgcagtgagccgagattgtgccattgcgctccagcctgggcaacaagagcaaaacttcgtctcaaaaaaaaaaaaaaaaaaaaaaaaaaaaagaaaaaagaaaagaaaagaaaaagaaaagaaaaaaaagaaatacagaccatattctgtgactacaaatttatgtaaaagattaaatattaaaagatttaaaaatacatttttaaaactaaaaattcagtacaacttatgagttcagacttaaaaaacacaggagacataaaatatttagaaatgagcagagacagtgattcatatcgaaacttgctgaatgcaataaaagtcctacttaggggaaaatgtacactttttttttttttttagaaaacacgaagtttgggaaattacttactgagcatgcaacttgtggagctggaaggagaaaggaagtcaaggggaggtgcaggaagggtccagaaaagcagcaaacacaaggttaacagaagaaatgccccagtaagtgcccaaggaactcacccaggtgcattgtcacgacgctttcagaaacaaaagaaaaagaaaataaacatattctaggtgagagaaaacagacaactgtgcactaagtttctattttttttttttttttttttttttttttga[134 bp omitted]cac[184 bp omitted]tctggaagttgacaagggagaaatgcgtttgaaaatagcctgtggccgggtgcagtggctcacggctgtaatcccagcacgttgggaggccgaggcgggcagatcacaaggtcagtagttccagaccagcctggccagcatggtgaaaccctgtctctattaaaaatacaaaaaaattagccaggcatgtctgtagtcccagccactccagaagctgaggcaggagaactgcttgaacccgggaggtggaggttggagtgaactgagattgcaccactgtacttcagccc[223 bp omitted]gagg[138 bp omitted]gggagggagggagggagggaggaaggaaggaaggaatgaaggaaggaaggaaggaagaaaatagcctatgtattcctatggagagatcccagagtgtattcttagagattaaacgacatcaggatgtcatctgtattgtgccaagaattgggggaatcagaatatacattcatattgactcatattcacccagaaacaaacactggaaggattaatatgagaaagttaaaattgtggctctcccacgttttcttccccgtccaccacctgaacaagctgcggtcctagaaatcacctcgactgctcctctttctcaccctctccccttgttctacctccagaatctgtcctcatgcagacactgcttgccagcaccacggcgccaggttcaccctctctcccctcgtccagggaacattccctaagtggtgtctctgtgttcatttgctgcttcttagctgttctcctcattgtagccagggtgatgttttcaaagggtcagtcaaatcatgtctcgctaccattgaaatctccagtgattcatgatgtacttcgcccaaaacccaaactctgtgacctacgggacactcactcacctctccagtttcatgttggtccctgtgcccctcactccctgccctcaggccacatgacattcctgctgttccttgaagacaccaggtccctccctgccttgggactctgcgtctctgcctgggtgcaccgacctcctgctttgcaccacagcctccaggtctctgctcagcatcatcttagcaagaagggccttctcagatcactctgttgaaagaagtccactcccctgacacccatccctttgctaagaagatttgtcttcattctctcttgacgttcatcctcctttctaattatctactctttgacttgtacgctgtccctctctccccattagaatggagacttcacttggccagggaccttgtctgtcttgatcatcactctatcaccggtacttagggcctggcacataatagatgctcagcaaatacttgtagaacgaatagtgaatcagaaacaatattggccattgtttactggacatttaaaggttaaataatggcacccctatgcaatgaaatactggattagcattaaaaatgatgctgctggccgggcacggcggctcatgcctgtaatcccagcactttgggaggccaaggcgggcggatcacctgaggtcaggagtttgagaccagcctgaccaacaggatgaaacctcatctccactaaaaataaaaaaaatagcttggcatggtggcgcacacctgtaatcccagctactcaggaggccgaggcaggagaatcacttgagcctgggaggcggaggttgcagtgagctgagatcgtgccactgcactccgggctgccccacacagcgaaactctgtctcaaagaaaaaaaaaaaaaaaggatgatgttgttttacttttattgacatgaaagatgtcaagggtattgttgagtgaacaaaacaggaaaaacacatgtatgtagaagttacatacattaagttatatatgtacatttacacacatgtttatggaaggagagatttctgagaaagtgttaacagaaatgtttgctgtgattaacatgaggtaatgagggtttcaaattctc[136 bp omitted]ctgcctcggcctcccaagtagctgggaccacaggcgcccgccaccacgccaggctaattttttgtatttttagtagagatggggtttcaccgtgttgaccgggatggtctcaatctcctgaccttgtgatccaccagccttggcctcccaaaatgctgggattacaggcatgagccaccgcgcctggtccctggactttttttttttaaagaaagggtcctgctcttgtcacccaggctgaagtgcaggacgcgatcgtagctcactgcactctcaacctcgcagggctcaggtcaacctcccaactcagcctcccgagtagctgggacttcagaagcgtgccacgcacacccggctaatttttgtattttgtatctaactcctgggctcaagcgatccgcctgcctctgtctcccaaaatgcttggattacaggtgtgagccaccatgcctgggtgaatttttttttttttttgagatggagtttcactcttgttgcccaggctggagtgcaatggtgcaatctcggctcgccaccacctccgcctgccgggttcaagtgattctcctgcctcagcctcctgagtagctgggattagaggcatacgccaccacgcccagctaattttgtatttttagtagagacagggtttccccatgttggtcaggctggtctcaaactcccgacctcaggcgatctgcccacctcagcctcccaaagtgctgggattataggggtgagccaccgtgctggccgaatttttttacattaagcatgtgtcagtcgtaactaggaaaaacaaaattatttttgtttaagaagataaaataaaatggccacctatgaggagctgggagtacaggcttaggtggaaacagataaggtgtcaagacctccttctgtgactgaccccttcagattttctccctagagtttcagtcatgcaagatgaggaggtctcagagcctcctgtgcggtgtagtgccagcaggtaacaatacagtattgtgtgcttacacatttgctgagaagatagatcttttgttaagtgctcttatcatcacaaattgatatgtggccataaaaatagtatcaaacaataataatatacaaatagacgggaggaacctgtgagaggtggtggatgggtttatgtcgtaaactgtggtgttgacacacagggcatactcatctccaaactcatcaagtcgtatatgttaaatacatactgctttttatatgtcaattattcctcgatagagtaaggtttttttttttttgtaattgcaagtgtctgcagagagcttctataggtttgggggtccgggagactcccataggtgtgccccgtgagcctcagcacctagggtgtgtgtagtggctattctgcctttatctgtattaaattttttaaaaattattttcccaggcattccacgacgctcaacttttcacccaagttcaagttcctgtttttttcttcacagaagtcgattgtgggcgccagttcccacattgctctcatcctaagtagcagcaacttgcgggctgatgcctgtgtccagccctagaagagcctccgtacctagaagaaaacctcccctcctgggagtcacggcgcaaggctgggctcccatcctcgcagggaggggcggatgcacctgcccctgcagatctgcgcccagatctgtgttatccacacccacatctgcgtctgcaggaagaggctccgcagcaggcaacagcttccatctgcgagcctcatttaatccccacgaggatcctgtagagggttcctatgttcacctctgttttatatatagacgaggacgctggctctgggaggagtaaagccgtgcagcagtaactcccgtgcagcagtaactcccgtgcagcagtaactgcagccgtgcagagtaaactcccagcacagaacccggcctccccggttcagaaacaaaagtgagctccctcctccctgcttgcgggcgaaactctcgctgcctgttgaacgtctccacctggatgccacggcttccccagactcccagtgcccccgggcaacgccttcctctctccccacctttccaaattttctctgcagcaagtttccctcctccaagtttctcccccttctccagccttcacgttcagtcccgtgtctctgtgccgtacaggactcagctgccataacagcagctggcgtctcagcgcccccggaagctgagactttccaggacaagaactgctttggagtcctctcgggccccagcacgacctgctacactgcaaactactgcaaagaacctttcaagactggagagatggagcaccccaagtctgttttacagatggaaaggtggtggctcaaagacgagataccacaataacagtggctatgaagctctcgctttgtcaagatacagttcaaagcactgggcatgcactgactcatctcacgacccctaaaacactcacgttggatactattgctactcctcttaccaacgcagaaacagcgtcacagcaaagttaagcagcttgcccaaagatcctccgctaggaagggaagaaggtggcctttgaacttgagctccccatccacagtctgcagtccttcagactggagcacattgtagaaattaacaatgtcatcccaacaacccttataaaacacttttgggccgggcgcggtggctcacgcctgtcatcccagcacttcggaaggccgaggcaggtggatcacctgaggtgagttcgagaccagccttaccaacaaggtgaaaccctgtccctactaaaaatacaaaaattagccgggcgtggtggctggcgcctgtagtcccagctactcgggaggctaaggcaggagaattccttgaacccgcgaggtggaggttgcagtgagccgagatcgtgccactgcactccagcctgggcgatggagcgagactccatctcaaaaacaaaacaaaacaaaacaaaaaacacttttgagttctgactttatttcttgctgttttcttatttttcatggaactcatcttaatgatttcacgtttaccaatcacgtatatttggacgtgattacagggccacagggcaacctccagaagcatgattcctttcctaagaatgaggaaggatgtggtcagtgtgttcctaaaattatgatactgctttgtaagataacatgttttgttcgttttatttcatctttttattttgaaacagagtctcactctgtcacccagcctggagtgcagtggagcaatctcaattcactgcagcctctgcctcctgggctcaagccatcctctcaccttggccccccaagtagctgggactataggcacacatcaccatacccagttaatttttgtattttttgtagagctagggtttcaccatgttg[133 bp omitted]tatgaagtgtttctctctttatttagatctttaatttccctcagcaatcttttgtagttcttagtgtacacatcttgcatttctttattaaattggtttctattcattttattatttttgaggctttgtaaataaaattgctctcctaatttcattattgaattatttttgtcagtatatagacatatgattgattttagtgaatatgtcttcatcgtgctaggatttttgttgttgttgctgctgttgttgttattgttgagacagagtttcgctcttgttgcccaggctggagtgcaatggcgcaatctcggctcactgcaacctccacctcccgagttcaagcaattctcctgcctca[134 bp omitted]cagtctcccaaaatgctgggattacaggcatgagccaccacatccggctcttgctagaaatttattgtacttttcagcttcataatttccatttagttttatgctttaataatatcccaaggtaacattatggtcactttctgtaactaatatttcttactctgttgatttatcaggggctggattactctccttcaagtttcctgtgctagcctaatggtttggatgttgttgttcaatgcaattctcctttatttttgttccatttatttttagcagctttgtttagctataattgttctactaaaaaaccttctcacttaatgtacacaatcagatgaatttggacacatgcaataaccccttggaagacattcacgtgcatgcgttgttggtttttccgcttcttacgggaactcctttcaggcatttccatctccacgctacacatggggaaatagaggctcacagaggagaaaggacgtggttcaggtcacacctgtccctggtcctccaggctgaggagcagagagaccacccaccttagtgctggaagggtttaacacatagcttgggctccctcttgtggccacagtggagaaactccctgcttagttcatttttattttttccatctggcattcatttttttcattcagtaagtatttgttggtcctgtcctgtgtgccagacactgtttgaggctctagaggtccaccaatatagaaaacaaacaccctttccatggaagagcttatattcttgcagaaggagaggggcagtaacccacaggcattatacagtcacagtcagctagaaggtgagagtgatttggataaatgagaaagtgcagcggtggtccagggggtctggagggtgcaaagctcagcagggggaatagtgtggcagttgcagacagaggggtaggaagagggaagtggcaggaagagaatgcagaggggtgagggttggggccacaggtcctgtgtagagccctgttggtcaccatgatcaccctgagtgagctgggaagtaacacaaatgactccaaatagaagcgccttcatggagccttcttcttcccagacttcaactagaaacctgagctgcctgtcacagcaggggacgtgtcatcccattagacttcaaacgtcctcagcaattccctgcccccttctttctaggagtcaggattcctcagccttgctctagaactgcatctggtgacccctagaaacctgtcctggaagccttacaaggctcttcacactcacagtttgtgatatgaccccagagttgtgcagtgcacaacctacacagctggacacgatgggcctggcactcttcctctgtgctcccactgcactctgtgctgactatgtcattccactgggtggtgccatgtcaacttctctcctctcctctcaatatcctgtaaggataagataggatcaaagttctacccacgtccctggtactcagaagaggagctgaaacattggcgaccactcattagcactctacttaacaaaacaaattgcccaggtagttatgattagatttctataaaaggctgaataattacagaaaggctctagaaactagtgtataattatgtacaggcgctggcagtgtgtagagtcatggaaatcagctaaggaatcgcggtgcagtctcaggaaccagctggataattgcaccaggagctcccaaaaccagctggataattatagtggagtccctggaactcagcgggtaattaccatgtactcatggaatcagcagtaataatagaagggtcccaaatgcagacactagggaaagtctggagacacttttgattgtcacaacccagaggagagggggatgcttctgggtggtggggggtggaggcgggggatgcacaggacagctcctcccccaaggaataacctagccccgaaagtcaacagtgttacccagaaaaaaacagggttcctttgcctggtgaggagcaaacaactctcccgagaatgcaggtgatgtggtttggctctgtgtccccacccaaatctcacctggtattgtaatgatccccacgtgtcgatggggggcagtgactcacgcctgtaatccaagcactttgggaggttgaggcaggcagatcatgaggtcagaagatcgagaccatcctggataacacagtgaaacccgtctctactaaaaatacaaaaaattagccgagcgtggtggcgggcagctgtagtcccagctactcgggaggctgaggcaggagaattacttgaacctgggaggtggaggttgcagtgagctgagatcacgccgttgcactccagcctgggtgacagagcgagactccgtctcaaaataataataataataatccccacgtgtcatgggagggacctgtgggaggcgactgaatcacgggagcaggtttttcccattctgttctcgtgatagtgaataagtctcacgagatctgatggttttataaatgggagcgcccctgcacgctctttcttgcctgctgccatgtaagacgtgactttgctcctccttcatcttccgccatgattgttagccctccccagccaagtggaactatgagcccattaaacttctttcctttgtaaatgaaccagtctcgggtatgtctttattagcagcatgagaacaaactaatacagaggttttgatcaagaagagttttatgacttgacacagctaaggaaggcactgggtgtattcttcaaagcagtgtctccctgaggaaaagggacaggagggctctatggggtgagggagcagggagagggcgcgtcgttgtatgtggaggagggtcccagtcacgcagatgcagcgagtcgtcataccagcacacgggtcgcatgttacggtaacgagactacagctcctcccgggatggagacttgagcgcagcagtgcagaaagttcactcgggttcatctctaagttgccagggcccgtcagaggctggttccaaccaacgagtggccgcattccacacagggtttggagaaaaacaggctgcagggcagaaggctgtgaaacaggctgattgctcaagttgattaaattcctataatccctggagaccctccctgtctccatacagta[184 bp omitted]gtggtggcgggcgcctgcagtcccagctactggggaggctgaggcaggagaatggtgtgaacccgggaggtggagcttgcagtgagctgagatcgcgccactgcaccccagcctgggcgacagagcgagactccgtctcaaaaaaaataaaataaaataagaataagaagaagaaagaagaaagaagaagaagaggaagaggaagaggaagaagaggaagaggaggaagaggaagaaaaatgttttaaaaagactatttttagagcaggttcaggttcatagtaaaatgaggggaaggtagagattttccatgtactccctacgccgacacctacatagcttcccccattaccagcgttccctaccagagcggtatttttattacaactgatgagcctgcattgacacattgtaatcacccaaagtcatattagggctcgctcagtcttcctgttgcacatcctatgagttcaggcaaatgtctaatggcaggcacccaccgtcacagtgttagacagaggagagccattgccctaaaattcctctgtgcaccacctattcatccttccttcgcccaacccctggcagctctgatcttttcctgtctccatactttgccttttccagaatgtcatattgttggaatcagacaatgcgtagccttttcagatgggattctaccacttggtaatatgcatttaaggttcctctgtgtcttttcatggcttgagagctcatttctatctatctatctatttatttatttatttatttatttacttatttacttatttatttatttttgagatagagtctcgctctgctgcccaggctggagtgcggtggctgtgatctcggctcactgcaagctccgtctcccaggttcaagcgattctcctgcctcagcctcccgagcagctgggattataggcacctgcccccacgcccggctaatttttgtatttttagtagatggggtttcaccatgttggtcaggctggtctcgaactcctgactttagatgatccacccgcctcgatctcccaaagtgctgggattataggcgtgagccaccatgcctggcatcatttctttttcttttcttttcttttctttttttttttttttttgttgttgttgttgttgttgttgaggcaaagtttcactcttgtcgcccaggctggagtgcagtggcacgatctcagctccctgcaacttccgcctcccggtttcaagtgattttcctgcctcagcctcccaagtagctgggattacaggcgcctgccaccacgcctggttaatttttgtatttttagtagagatgggtttccccatgttggccaggctggtcttgaactcctgaccctgtgatctgtgggccttggcctcccaaagtgctgggattacagatgtgagccaccgtgactggctaatttttgtgtttttagtagagatggggtttcgccatgttggctaggctggtctcgaactcctgaccttgtgatccgcccgcttcggcctcccaaagtgctgggattacaggcatgagccactagagtctctttgtgaaaaggaatggaaggatgtggtgtgat[139 bp omitted]catggcgaaaccccatctctactaaaaatacaaaaaattagccgggcgtggtggcaggcacctgtagtcccagccactcgggaggctgaggcaggagaatagtttgaacccgggaggcggaacttgcagtgagccgagattgctgcactccagcctgagcgacagagcgagactctgtctcaaaacaaaacaaaaaaagcttaccctccatgatgcagcaatcccactactgggtatatgctcaaagaaactgaaaccagtgtgtggaagagatgtctgcacccctatgtgtattgcagagttattcacaatagccaacatatggaatcacctaagtctccatcagtggacaatgggtaaaggaaatgtatatatacacagtggaaatactatccagccttagaaaggaaggaaaccctgtcatttacagtatggatgtaattgtcaaccttcaggacatcatgccacatgaaataagccagatacagaaagacaaatatcgcacaacctcacttatacatggaatattaaaaagttgaactcaggccttcgagactagccatggccaacatggcaaaacctactcgggaggctgggcacggtggctcacgcctgtcagcactttgggagaccaaggcgggcagatcacctgaggttgggagttcgagaccagcctgaccaatatggagaaaccccgtctctactaaaaattcaaaattagccaggcgtggtggtgcatgcctgtaatcccagctactcgggaggctgagg[166 bp omitted]aaggggagtagggattgggaagatcgtggtcagagggtacacaattttagatagaaaaaaataaattcaagagatctgttgtgcaacatggtgacaaattagtgaaaatgtattatgtacttaaacattgttagcagaatagatcgtaagggctctcgccacacacgcaaaaatgacaactatgtggccacgaacggtggctcacacctataatccaagcactttgggaggctgaggcaagtggatcacttgaggtcagcagtttgagaccagcctgggcaacatggccaaaccccatctctacaaaaaatacaaaaattagccagacgtggtggcacacacctgtaatcccagctactcgggaggctgaggcacaagaatcacttgacgtgggaggtggagtttgccgtgagctgagatcgcaccactgcactctaggctgagtgacagaatgagactctgtctcagaaaaaaaagtgaggtgatggatatgttaaacatcttgattatggtaattatttcacaatgtgtacatatgtc[139 bp omitted]cctcagcctcccgagtagctgggactacaggcgcccggctaatttttgtatttttttttttagtagagacggggtttcaccgtgttagccaggatggtctcgatctcctgaccttgtgatccacccgcctcggcctcccaaaatgctgggattacaggcatgagccaccgcgcctgaccaaatatatacgcttttatttgtcaatcatatctcaattaagccaggaaaaaattggtaaggctacttttggaaacactttgacactatttcaaaaaattgaaactaacaatccctatagcgcaatcattccattcttatatgtatactctttaaaaattcttgcacatatgcaccaagaaacatgtaaaaaatgtctgttacgtaatagggaaagtaaaataaatagaaatagaaaagtaactaaaataaaagaagcccatgtgttcatcaacaggtacaaaaatacaaaaactgtgatatagacctatattggaaagcttcaaactatggcattgaaaatgatttcacgaatcatttcaaaaaaaaattcatggtttctgttgtcatttttaccaagttcattccaatatgtggtttagagacactattttaaacaaataaggggccaggtgcagtggctcacgcctataatcccagcactttgggaggctgaggcgggcagatcacctgaggtcaggagtttgagaccagcctggacaacatggtgaaaccccgtctctactgaaaatacaagaattagccaggcatggtggtgcgcgcctgtaatcccagctcttcgggaggctgaggcaggagaattacttgaacctgggaggcagagtttgcagtgagccgagatcattccaccgcactccagcctgggcaacagtgtgagactctgtctcagaacttaaagtagaataaaataaaataataaaataaaacaaataagggaacgacaagcacagttacttctgcagaggaggaaagtggaggatgagaatggaaggagattccaggtagatgaggtggtcgggatgagattgtagctcttaattggatggtgggctaagtgaggccgtttcgttaatgtttcatgattcaagctgttttataaattctcttttatttatgaaaaatacataatacatgtttggtaaagtgatcaaactttcttgatcaagatatcaaaagaaagacccaagattttattttctatttctttctttttctttttttgagacggagtctcaccctgtcacccaggctggagtgcagtggctcgatctcagctcactgtaagctccacctcccgggttcacgccattctcctgcctcagcctcctgagtagctgggactacaggcacccgccaccacgcctggctaattttttg[132 bp omitted]atcagttagctattgctgtgtaacaaatcacctcaaagggagcagcttcagacaacacacgtttattgtcttgcgatttccgtgaatcagggatctgagcacagcccggctgggtcttcagcttcagggtctctcccgggctgcaatcaaggggccagcagctttgtggccatctcaaggttctgttgatttcatggtgttgctggcagttcagttctttgctgactcttggccagaagccacccctcagttccttgccatgaaagttttctgcaacaggatagctttgtttcatcaaagtatgcaaactaagcaggcaaaaagagtctgctaacagaatgcaagtcacacaatcatccttaaaaggacgggattacatgatgctataaataccaggaggtgaggattattggggaccatctgggaggctgcctaccacaccgcacaaggcaaaccttatgaatatgtatggattatataggttgctttcaggcttccaccaaaaataggattgccttacagctctaccagcctaggacccaccccagcaggtgtggcttgcttgttttaagggagcagagacagagggttccttatatcccacagccaagcccttacaggcacagcagggcagctgcttaaggtggagagggagtctaaccggttttcttaccatgcttagggcagaaaacataatctctattttgccatgtaagactcaccactgagcagtccctctctttcctctgtattacactgacacttcacataaacctctaaacctcatataacctctaagcagagataggcttcataaaggaatttagccagaatgccacattatttttccttgttgcagagagtagcatctatcttatgggaagagtcatagaa[181 bp omitted]gtgttggcggttgcctgtagtctcagctactcaggaggctgaggcaggagaatggcgtgaactcgggaggtggagcttgcagtgagcggagatcacaccactgcgctccagcctgggccacagagcgagactccatctcaaaaaaacaacaaaaaaaaaaaagaaaagaaaatggtcaggccgggcgtggtggctcatgcctataatcccagcactttaggaggc[137 bp omitted]tcaggcaggagaatagctaaaacctgagaggtggagattgcagtgagccgagaccgcaccactgtactccagcctgaacaacagagggagaccccatttcaaaaaaaaaaaaaaaaaaaggccgggtgcggtggctcacgcctgtaatcctagcactttgggaggccaaggcgggcggatcacctgaggtcgggagttcgagaccagcctgaccaacacggagaaaccccgtctctactaaaaaatacaaaattagctaggcgtggtggcgcatgcctgtaatcccagctactcgggaggctgaggcaggagaatcgcttgaacccgggaggcagaggctgcagtgagctgaggtcgagccactgcattccagcctgggcgacagagcaaaactccatctcaaaaaaaaaaaaaaaaaaaaaaggctgggcgcggtgactcacgtctgtaatcctagcactttcggaggccgaggttggtggatcatgaggtcaggagatcaagaccatcctggccaacatgatgcaaacccatctctactaaaaatacaaaaattaactgggtgtggtggcgcatgcctgtaatcccagctacttgggaggctgaggcaggagaatcacttgaaccagggagtcagaggttgcagtgacgggagatctcaccactgcactccagcctgggcaacacagccagactccatctctttaaaaaaaaaaaaggcccacattgggccgtgtgatgggggatcccactctccacctcaaaggatagaatggattccacctttccctccacagaggaaggcagaaccagacttcccactaagactcagactgacagggacctctttccaagtagcaaaaaggttcatacacggaaagcggaaaatgacaaattatgacttgccacggtgcatagcagccaaggtggttcccaaaataaaacctcttcccacacactttgtgccaggtgccccacgtcttttttttttttttttttttttttttttgtaattaaaggagatcgacaaatctggggtgagaaggttggtagaggatgagtttttccttcaacatcttattataaaaatttttcaagcatagagaagagttgaaagaatcttagaatgaataccccatccacaccacccagacacccagactcaaccattcacaactttttttctttttcgagacagagtcctgctctgtcgcccaggctagagtgcagtggcatgatcttgactcactgcaacctctgcctcccaggttcaagcgattctcctgcctcagcctcccacatagctgggattgcaggtgtctgccaccatgcccagctaaatttttttttttatttttagtagaaacggggtttcatgatgttggccaggctagtttcaaactcctgacctcaagtgatctgcccgcctcggcctcccaaagtgctgggattccaggcatgagccaacatgcccagctaatttttgtatttttagtagaaacagggtttcattatgttgaccaggctggtcttgaactcttgacctattgatctgcccgcctcagcctcccaaagtgctgggattttcaggtgtgagccaccacacccggctgttgcacacatcttaagtacaccattaactgtgtgggtttttttgtttgttttatttatttattatttatttatttattgagccagagtctcgctctgtcaccaggctggagtgcagtggcacgatcttggctcaagcgattctcgggttcaagcaattctcctgcctcagtctcccaagcagttgggactacaggtgcctgtcaccacgcctggctaatttttgtatttttagtagagacagggttccaccatgttggccaaaattgtctcgatctcttgacctcatgatcctcctgcctcggcctcccaaagtactgggattacaggcgtgagccaccgttcccggcctaagcgtgttttaaaattatatactgaagcccctatggagacatagaatatggccattgtcacagcaagctcccaaatgcacctgcccagtcacatcttgcctttactcccctggaggctaccactcttctgatattattattttttcactatagactaatttcaactgttctgggacttcacgcaagcagaatcataaactctcagaaaactgaactctcctctctggcttcttccactcagctcaaagtttctgagattcacccgtgctgctgtgtgtgtccacagtccgttcattttcactgcggggcaggattgcattgtacggggttccgtggtttatttatcctttcttccactgatgaacacctggctgtttccagtcttgggggctcttgtgaacaaagctactgttaacatttctatttatttatttatttttgagacaaagtcttgctctctcacccaggctggagtgcagtggcgcgatcttggctcactgcaacctccgcctcatggtgcaagcgattctctgcctcagcctcccgagtagctgggattacagacatttgccactgcacctggctaattttttttttttttttttttgtattttagtagagacggggtttcaccatg[139 bp omitted]tccagagcccagcccccagccacctccatttctgagctctcacactcagggctgctgtgcacctgccttcatcacccagggccaggaaccagaccactagagtaggcccaatgccccaggccctgctgaaattattcaaattagctaatcacaaacctgtttaccctgccccacccactcattcctgcaaaaaccaaatcaagctcttgccctctctccgccctcactccctctgcctctgatccctcgtgctctcccgtgtgacctgcatgctccctcggccctggtgctctctgggtgtcctgcctggcctggcatgtcccttcctcttgagaactgtgacaaactgtcttctcagtggtccatctcatctgctgggccccccatacctatgtatgaaaacatcttgaagccgggcgcggtggcttacgcctgtaatcccagcactttgggaggctgaggcaggtggatcatgaggttagtgtcacgcgagtccgtgtgaagagtccaccaaacaggctttgtgtgagcaacaaggctgtttatttcacctgggtgcaggcgggctgagtccgaaaacagagtcagtaaagggtggtgggattatcattagttcttacaggtttggggacaggcggtggagttaggagcaatgttttgcgggcagggggtggatctcacaaagtacattctcaagggtggggaaaattacaaagaaccttcttaagggtgggagagattacaaagaaccttcttaagggtggggaagattacaaagtacattgatcagtcagggtggggcaggaacaaatcacaatggtggaatatcatcagttaaggctattttcccttcttttgtggatcttcggttgcttcaggccatctggatgtatagatgcaggtcacaggggataggatggcttagcttgggcttagaggcctgacaggagttcaagagcagcctggccaagatggtgaaaccccatttctactaaaaatacaaagaattagccaggtgtggtggcatgcacctatagtcccagctactcaggaggctgaggcaggaga[145 bp omitted]ttggaaggccgaggagggcggatcacaaggtcaggagttcaaaaccagcctgatcaacatggtgaaaccctgtctatactgaaaatacaaaaattagccaggcgtggtagcgcatgcctgcagtcccagctactcaggaggctgaggcaggagaatcgcttgaacccgggaggcggaggttgcagtaagccaagatcatgccattgcactccagcctgggctacagagtgatactctgtctcaaaaaaaaaaaaaagaaagaaatacattggcgtggttcagaaaggtggaacaacacaaagggtggggcgaggcgtgcaatttaaacattttctgattgacaattggttgagttttctctgaagacccggaatcaatagaaaggaaatgttcaggttaagctaaaggatcgtggagaccaggttttattgtgcagaggaagctgacttcagagagagagggcagggtgtaaaatgcttcttacaggacctaaaagagtgcctgggccggccacggtggctcacacctgtaatcccagcaactttgggaggtcgaggcaggcggatcacctgaggtcgggagttcaaagccagcctgaccaacatggagaaaccctgtctctactaaaaaatacaaaattagctgggcgtggtggtgcatgcctgtaatctcagctagttgggaggctgaggcaggagaattgcttgaacctgggaggtggaggttgcggtaagccgagattgtgccgttgcactccagcctgggcaaaaagagtgaaactctgtctcaaaaaaaaaaaagagtgtctggctctcctgggcctggaaaggaagaagggaaaacaaaggagaaacggggttctgtaaagaatgtggatttttcccacaagagactttgcagggcaatttcaaaatatggcagagaaacatgttttggggtaaaatatttttattttcttccttgtgttgtaatgctatgccagagtcagattggaaagtaagtcacaccatagaggattaaatacaacccatctgatgagaatttatggtttgtaaggcatgactcctcaaacgccttaggtaggaatttgggcaagataaaaaaatcagagcttagttctcaggggtcatggcgggacaacaggagagagcgtctc[137 bp omitted]caaaaccccatctctactaaaaatacaaaaattacctgggtgtgatggcatgcacctgtagtcccagctactcgggaggccgaggcaggagaattgcttgaacccaggaggcggaggttgcagtgagctgagatggtgccactgcactccagccagggtgacaagagtgaaaactctgcctcaaaaaaaaaaaaaaaagaatattacagtgaaaacctagatagttatcacctggattctagtctactgttaatcttttctccttccttccttccttccttccttccttccttccttctctctctctttttccttccctttctttctttccttcctttctctctgtttctttcctttctctcccttctcttttcctctttctttctttcctttctctccctctttctttctttcctttcctttcccttcccttcccttccactcactcactccctctctctctctctctctctttcctttctttctttctttctttctctctctctccctccctccctccctccctccctctctgtctctctctctttctttctttctttctttctttctttctttctttctttctttcttctttcttaagacagggtctcgctatgttgtcccggctacagtgtagtggttattcacaggtgcaatcatacccacagagcagccttgaacttctaggctccagtgatcctcctgcaccagcctcctgagttgctgggagcacagactcatgccactgtaccttgcttaatatttatcttcctttgccttattacctatccctccatccatccgtcttattttcttttgtgattaacttcaaaaagagactgcagacaccactacactttctcccaatactaagcatgcacctcattaacatttttcagtaaaatttttatagagtggagtgcacaaatcttttttttttttttttgagatggagtttcactctttctcccaggctagagtgcagtggtgtgatagctcactacaacttccacctcctgggttcaagcgattttcctgcctcagcctcccgagtagctgggattacaggcatgcaccaccacagctggctaatttttgtatgtttagtagagacggggtttc[132 bp omitted]aatgcagacactggtacaaaacgaaccctcatcaagatacagaacgaggccctttatcccaggaagttcccccagcccccttcccagtcaccctgaccctactcacccagaggcaaccactgtttttattatttttgctaccatatgttaattctgtctgtttggaaaatcatctaactgaactcatacagtgcatcctcctttgtttctgacactcagcacaataattttgagaccgacccatattgctgcatgcattattagcttgtgccttttcattgctaagtagtattccattctgtggctatattacctatcttggtccattcccctgttgataggcatacaggatgtttctagcctgaggctattatgaataaagctgctgtaaacagtcttgcaaaattcttggtgtggataaatattttcttttcttttgggtaaaagtagaattgttggccgggcgtggtggctcacgcctgtaatcccagcagtttgggaggccgaggtgggcagatcacgtgaggtcaggagtttgagaccagcctggccaacatggtgaaaccccatctctactaaaaatacaaaaattagccaggcatggtggtgtacacctgtagtcccagctactcgggaggctgaggcagaataatcacttaaacctgggaggcagaggttgcagtgagctgagatcatgccattgcactccagcttggtgacacagtgagactccgtctaaaaaacaaacaaacaaaaaagagtagaattgttgggtcatgggataggtgtgggcttagatttgtaagaagctgccaggccttttcctacagggtttgtaccctttactctctcatcaataatggataacactcgggtgcttcattcctggaatctttggatctcaggcctgctttgggctgttggtatttcactgtggttgaatgcagctctattagtcagatttgtccaaagaaagaaaaccaaagagatatataaagagataccagcagaggtttattatgagaacttttcttacacaattctggaggctgaggagtcccacgacgtgctgtccataagctgaagaagcaggaaagctggtggtgtcattcagtctgaggctaaaggcatgaggaccaggaagtttgatgtcctagggcaagagaaaatggatgcgccagttaagaaaacacagtgaattcgcccttcctctgctttttgttctattcgagcctccagcagattggatgaggcccgcccacattggtgagggagaacttctttactcagtctactgattcaaatgctcacctcttccagaaacacccccacagacacatccagaaataatgtcttaccagctatctgggcatcccttaggccagtcaagttgacgcataaagttaaccatgacatcagcttatttaataaactggctatatctgcatatttgctcatttgcctaatgagttatctctatcatgctctgtgaaagcagagattttcatccctttagttcactgctgaattcccagggcctagaacaatgcctggcacctagtagctgtccaataaataaatacttggggaatgaacaaaccaatgaatgtatggattcttctttattattaatagatcccagggcttacttaacacagcctggcagctattaaacatgtaatcgaaagaaaggaggggaaaaggaaggaagaaggaaggtagcaatgaaggaagaaggaaggagggaagaaaggaagggagagagagaggaaggaaagaaggaagaaagggagggaggaaggaggggagggagggaggaaaggaaggaaggaaggtaaaaaggaagagagggaggaaggaggaaggaaggagaaaggaagagagggaggcagggagggagggagggaggaaggaaggggggagggagggagggaggaaggggggagggagggagggaggaaggaaggaaggccagaaggcaggaaggggtagggagggagggagggaaagaggaaagaaggaaggagggaaggaaggaagggaggcggggagggagggaaagatcataaggatgactgaacatctgaaggctgaacagctttacgtatttatgccttttccggtcattttcttatgtacttgtgaattccttcactttgctttccttctatttggcagatgtcactgtagtcatttttaaaaatcaacaactgtcaccctcgtaataattcgcgagcgcttgtcaagcactttgtcagcaaacacttcccgtgtgttcactcgatctgcacaacaaccctgtggaattggttaaggttgctctttcttgcttttttttttttttttaaacagagtttcactcttgttgcccaggctggagtgaagtggtgcgatcctggctcactgcaacctctgcctcccgaattcaagcgattctcctgcctcagcctcctgagtcgctgggatcacaggcacgtgccaccatgctcggctaattttcgttatttttagtagagactgggtttcgtcatgttggccaggctggtctcgaactcctgatctcagctgatcccccccgccttggtctctcaaagtgctgggattacaggcatgagccactgagcctggccaaggttattattttcatcctgtttatgtgaaccgaaagcacagagttgagaaaattgtctaaggtcaccgagctaataaggagctgagccagggttgaaaccagataatgtggctgcaaagcatgaactcttagtcatgccaatcatgaactaaagagcgtccttcatttgtgtctctgttcagatatcatccaaatggagaga[222 bp omitted]gaggcagataattgcttgaaccggggaggtggaggttgcagtgaaccaagatcacgtcactgcactccagcctgggcaacagagcaagactctgtctcaaaaaaaaaaaagtagtgaccacctcatccccaccacatccactcacatctatgtgttgcttcctcttacctgatagtatagactcagctcacctgttcattcctcaattttctaccttctgtactccagcggttttagttgtgccaactggagactttgtcttttttgcttatgcccatttctccagaacatgcagcagtgcctgggacatagtaggcactcaatacgtgtgtggggaacagatacatcattgaagcacagctgttagcacagcacacatggtcctgatttattgagaacctactatgtgctaggcacaggaccaagcagttggaaatctctcctggcattcttacagccactcagttaagcaggcaagtctcccaaagcttaagccgtgggaagcacatgctgagtccttcagccaggagctgtccttgccttctgtcagcagaagctggtcaggaggccttcccggaggaggcagcatcactgcctcccccaatcttccctcccatccctgtggctgctccttctcagtctcattgtgggcccctctttctccacttgtccctttcatgcctgtactactccatgtctggctagaccagagcttataaaccagccagctccaacccacagacaggttttatttggcccacacagcatttttttttcatttgaattagttttaacatttaaaagctgagggattttgcttttaaaaatatccagatttctgccttctcttggaaatttggaacatctggtggtgccaggtccctcttcccatatggcaagcgttggctgaaacgaaatagcaacagccatgttctctgagctaccctctaccagggggtttgcatgcgtcccaagccatgaatgaacacctgcagagcttgagatggtttaggggtggtattcagccaagggctctagaaatacccaagggccacctggaatgaccgtttgttttcctcagcagaaacagacccagggaaccacggccggagaaggtagagataatacatttctgtcaggcagcattgcagatgtcccatgcaggaggatggatgtcctgggtttaatcgatgcaggctaagccattctctaaagaggcttgccttctggggcccaaaacacatgtgagggagacagagaggtggggacagaaagagccagagtaaagcagagagagagagagaaagagataaagagagagagagagagacagagagagagacaaagagagacagagagagagagagaaacagagagagagagacaaagagagagagagacaaagacagagagagacagagagagacaaagagagagacagagagagaaagagagacagagagagacagagagagagacagagacaaagagatagagagagaaagagagagagacagagagagacagagagagagagacaaagacagagacagagaaacaaagagagagagagagacagagagagacagagagagacagagagagagagagacagagagagtgagagagagagagagagagtccatcaatttaaagtctttttctaggggaatgaaggggaatggcatatgtggtgactatggggtgtgtgtgtgtgtgtgtgtgtgtgtgtgtgtgtgtgtgtgtgtgtgtgtatttcatgtaagaaagcagcatgctgaggacacagcagcaagaacaaagcaatgagctccccctggaagccaatataacttacttctacttagtaacatttaccccttttcttttttaagacagagtctcactctgtcgcccaggctggagtacagtggcacaatctcagctcaccgcaacctctgcctcccaggttcaagctattctcatgccttggcctcctgagtacctgggattacaggcacacattgccatgtccagataatttttttgtatttttagtagagacagggtatttttttttttttttgagacagagtcttgctctgtcacccaggccggagtgcaatgacacaatctcggctcactgcaacctctgcctcccaggttcaagcaattctcctgtctcagcctcccgagtagctgtgactatgggagtgtgccatcacatccagctaatttttgtatttttactagagatggggcttcaccatgttggccaggctggtctcgaactcctgacctcgtgatccgcccgccttggcctcccaaagtgctgggattacaggcatgagccaccatgcctggcctgtttgtttatttttttgagttggagtcgtgctctgttgtccaggctggagagcagtggcacaatctcagttcactgcaacctccgcctcctggattcaagcaattctcttgcctcagcctcccaagtagctgggattacaggcacacaccaccatgccaggctaatttttttgtatttttagtagagacaaggtttcgccatgttggccagactggtctcgaattcctgacctcaggtgatccactggcctcggcctcccaaagtgctggaattacaggcgtgagccactgggcctggccgagacagggttttaccatgttggccaagctggtctcgaactcctgacctcaagtgatctgcccacctccacctccccaagtgctgggattacaggctcgagccactgcgcctggcccccacttaccccttttctaacaccaacccagattgttctctgcaattcaggattcatgtttctcaggtggcaatccaagatccattagccagccacaaaacaatttagaaggttgtgaccagatttgaattacaaaatagaagtaacagaggatagaaattatccaagagcattgcacatagtggtcagaaactttttacttttttttttttttttttttttgtgtgtgtgtgtatactagatcataatgtaaaatgtatttctcactgtgggttgtggccctatcagttggaaaccactcatctagaatattatccatatggagagggctgatgcagggccaaatgatggagggtataaactcagggctgagggtgtgacttgattctatgggcaacgtggagccactgagctctattgggttgcacagtcaccaccagcacctcactgtcctgcactctgatgtacacatgcccaactgtgcacatcatgacgtttggaattcttcccattagcaaatcctgctgctacaacaaacactggctgtggacatgatgcaagagattgtcagaacaagagttttagaatatactaatcttagccctaaagggttaagccttcattttacagacagaaaaagagggactctaagatgaaaaactacttgcctagagtcacttaatacacctctaaccgctcatctcgggatcttcttcatccccaagccccatgtaggccacctggttgggaatggtggagaacatgactctagccagaaccagagaaagctgaagaagacctagggtagtgatgagagagggtgtgtgtgtgtgtgtgtgtgtgtgtgtgtgtgtgtgtgtgtgagagagagagagagagacagagataaggcgcctattctcactctcccatttcatcatcaataccttcaccaatatcactatcctcctcctcaccgtcatcatcatcgtcctcatcaccatcatcaccaccatcatcatcatcattatcatcatgacatgtcaacataatcttgtcttcaccaccatcatcatcatcactatcatcatcatcatatcctcatcttcaccatcaccatcaccaccaccaccaccatcaccaccaccaccaccatcaccaccgtcaccaccatcaccatcaccaacatcatcaccaccatcaccaccatcaccagcatcatcaccaccatcaccaccatcaccaccaccaccatcaccacatcaccatcaccaccatcaccaccaccatcaccaacatcatcaccaccatcaccaccaccatcaccaacatcatcaccaccatcaccaccatcaccaacatcatcaccaccatcaccaccatcaccatcaccaacatcatcaccaccatcaccagcatcatcaccaccatcaccaccatcaccatcaccaacatcatcaccaccatcaccaccaccaccatcaccaacatcatcaccaccatcaccaacatcaccaccaccatcaccaccaccaccaccatcaccaacatcatcaccatcaccaccatcatcaccaccaccatcaccaccatcaccaccaccaccatcgccaccaccatcaccatcaccaacatcatcaccaccatcaccatcatcaccaccgtcaccaccatcaccaccaccatcatcatcataattatcatcatgacatgtcaacataatcatgtcttcaccatcatcatcatcatcaccatcaccatcatcaacaccaccaccaccatcatcatcaccatcaccaccatcaccatcatcatgacatcatatcaccaacataatcaccaccatcatcgtcatcaccaccacctccgctaccaccagcattcctcttttccctagccctttcttgccaatctggagcaaaatatggaaatgggttaagtggagaactaatctccctttcttccactcatcccaattcccacaagagaggccacgtgtgtggtttccagatggcaaagtctcaccctgccctacagcaagaggggacccctggggccagattcctgagcacctagttttggctgcaatagtgacagtctgggtgatgatgtcagggtggccaggtcccctcccagggttggcacttccccatctatcggtgtggcatcggaggattccagtgagatgtaacatggggagtggctggaaaaatactctgtaactgtatggcgaatgccaaggggcaggggtccttgtatacaccgaagtaatcccgagtcagtttacaggatgggaagggcccctatatagatgaccagggtccttatgcaggtagaaggggtccttatgcagcatgaaggcttgctacacaggcgtgtggatttttccatacattctggagtagcctctacacataggagtgtttgtgcttagaagctgtgtccttatgcaggctaggaataaaagtgggacggagattttacacaaatacgggcatcttttacaggtgggagcactttcgtacacagaggacttcttatccatggaattggccgttctttgtaaaacgctctgtacttactagcaacctttacacagacatgaagtttctccataaggataaagggatcattatgttttaggtgaaataacagtatgagtggcctcgtatggacaaggagggctgatttcaatcgcgatgcaagccagctgtccggatgccgccgacgccagcagcgcggtacctgcgcgggcagcaggtgggagccgcgaccggggtggggcgcggagcgctgggggcctcccgactcccgcagtccccgccgcgaccaccaggggcagcaccgtccccgcccggcccgcgcctccctccccccaatctccgccccccaccccctgcctcccccccgctcccgctcccctgagcccagccagaccccgcgccgcccgcgccccgctcgactccggaggctcccgcagccccggcgtccgccccgctgccccctcccccgggggccatgggggcgcccccgggctaccggccctcagcttgggtgcatctcctccaccagctgccccgcgccgacttccagctccgcccggtgcccagcgttttcgcgccccaagagcaggaataccagcaggtgggaccgggcgccagggcctgggggccagggctgggggccggagctcctgggtcccgagggagaagggggctgggtcacagatttcctgagctccgccggaggctgggggccggcccggactttggggtttcggagggaggaggagcctgggggcgcccatgcctggaggttctcctgggacgcgcgctgggggtccagacctcgagctctctaaataagggaaggctggggacctgcacccctgagttcatggagaggaggggaggggggcccggattcccgggtgtctgatacctgcctgggaagccggcctccagggtcatcgggagggtaggtctactcttcctgccctaaaagatgaccctgccccacaggatcagagcaggtgaatatgtcccagataaggtgggacccaggagacagcggacctgataacggtggcggggaaaacgctggctgctgcggtgctgggatgggattgagagtctgaaatggggaagggggcttcaggggctgaggaccagggctggaaaatgaaggggctctgggagaggaagcttcttgcccgtcccaagaaagaaggggtggtcagggcgctgcaggggtgagggccgagatgaggctgggtttggggagcctcgggatgacagacccgggtcccgagggtggggccggtgtgggaacctcacagaagccggtgtccctggggaaggggcccggctcggggcagctccaatgggcgaaagagctgtcccctgacccagtttaattcaagtccttgacttcgagattaatgaggagaaaggcttggctgagctggggacgggtgggggtgctgggagtcccgatgtggccccaggacgggtcctggccctgctgatggggcctgagcccctgggctccgtcttgggttgctcctgggagaagggggctgggattggagagctcagggggcgtggagggggtcccagaaaagcgcggaggggatgagtgctgtgttctgagctatttgggtcacggctggcacagccctgagcagctcttccccgcctgctcctcgccgccccctctccccacacacggggaccgccgtcccctcgcccacagcctcgcggttacacaacggccacctccaacaacgccgctccaccggctccggcctcggcccagactcacgcccgctctggcccggagacctcccgaagccgcacgcggggatccgcggccccagtcaccgccagaggcacgggtttgggggagcctcactccgcccccacggtcgggggtcagggtcagggtggcagggatgcgcgggcagagccccacagccgaggagggcaagggggacccctgcagggacgcgaccaccgtgggtacagctgcagacacagccagggcctcagggacactggcccgggggaggcacacagccacacgcacacactcactggcatatgcacagcacacacacacgtccacttactcccattacacactcacatgcacacacatatgcacaggcacacccagacacgcccacttattccaacacactcacatgcacacacatatgcacaggcacactcagacacacccacttactcccattacacactcacatgcacactcacatgcacacactcagacacgcccacttactttcattacacacatgcacacacacatatgcacaggtacacacacacgcccacctactctcattacacactcacatatgcacacacacatacccatttactactcccgctatgcactcacacccacatacaacacacgcatatagacacatgcatacactcacatggatatacccacttacacatacacaatcacacatatgcacacgcacattgcgcacagtgactcacaacacacacatacacatgtataagcatttactcccatatacaagcacacactgcacttatatatatatgcttacacactcatgcatgcaccgtcacatacacgtttatactcccatacacacacacacgtacattccattcacatctacacacacatgcacacacatattgactatagcattcatgtgcacacacacactcacatgcagtcacgcatccacacacacactcatccacactgttacacacacacaaccggacccactcacaggcccaaggaactgtgcccagaacacacaaatgcccacagatgttctcatttgcagacagcagtgcacccaggagacacactcaggtgccccctcatctcatggagacagcccaaagataaaaacatccagtctcaaccagaaacacaaacactgcacacacttgggacacacacacacacacacactgtgccactgtgtgtgtgtatgtgtgtggacaaaggcagaaacaccgtggtttaggggaaacagccttggcaagtccagaggtgtgactctgatcccaatgttgtccctccatgctccggggctcagtgcaaaccccctgggccactgtgggcctctgggaccgcacaggtcagctgtgaaatccccgccacgtggagagccctgttattctgcaaggctctgcccaccgcagaacgtttccgcggcctgcctgtcttccgggccttggctctctccgcctctctgtccttgtgtgtctctcccgtctccatagtgttctcacgctctctctcccttactctgctcttcctctctgatttgatcccttttgctctctgcctttttctgactcatgcccgaaccttgtcttatctttgtctctttttttggttgtgtctttctgcctgtgcctccctccatctctctctctctctctttctgttctgtcttcactcttccagtttccatttctgagtcttgcatacacacacacacacacgttgccacacagcccctcgtcccgtccctgggtgacaagctcaggcgctgtggggtgtagcgctcagcagcaggggagacagtgagcagggaggagagggggaggaagcacgcctcccccagcctggcccgaggcaccaggaacaggtgcccccacacccccacccgccccctgatcccacacgattgtggaggggccttggcaggtccttgggaaaacctccattccaactgctggctgcagagagaaggaaacccaggctcggagaaggggcggttcctgctaaagattgcacagccaatggagggcagagcagaattgggacccaaggcttggggcccccagttggaagctccctccagcaagctggccctgacacctggagccccagctgccagcctgggaggggctgggacccaatctcccccaagattaggccagggatgtctcccaccttcactctgacatcccagaccccgaccccccagccacgcaggaagggggatctgagtgtggaacacacgggtgccctcggaggtctgatgtcacccccttccccaggccttgttgctggtggcggccttggcgggcctgggcttgggcctgagcctcattttcatcgctgtctacctcatccgcttctgctgctgccggccccccgagccccccgggtccaagatcccctcgcccgggggaggctgcgtcacctggagctgcattgtcgcccttctcgccggctggtaatggggccccagggtgggtgggcggtggggacagggctccccaagctctttgctggccttcctgggggtgtcctccggggacatggaggaagcagacaggaaggaggaaactccctcgtccctgtccctgccatttgcaagcccacttcagcgcacagcaggaaggactgtcccatttgatggatggagaaagtgaggctctggagaggaagtgaatcaagggcagccatctggtgagaaggcgcaggggcagtcagatggcctggttttggtggctctcccattgaatagctgtgtgacctaagggagtgatagtctccctgggcctcaatttccacatctgtaaactgggcattatcatctcgcccacctcctgcgggggtaagatggagagaaagcacagtgtctgacttgcagctactctcagccaacattaactggtgatgtctgtcattccgtcattcaccagctcattcattcgacaactgtttattgagtatttactatgtgccagatactgaccaagccaggcaaggagcccctcgtgcagcttatgttctaatcagggagacggacgataaatagatataatcaccctccaagagcacctcatctgtgcccagacctgagctggtctaattccttctcacaataatgctgctggattcaggggtgtcaggcccagtttccaaagaggaaggctcagggacagaggggaggtcacctttcaaggccacgtggcttaagaggcagcacagagattcagacccaggttagtaggaccccctcacacccctcaaagcgagcttagggggcttccaatgtgaacacaccagctaccaagaacgagctctgagcacagccccctccccggcagggcagcacccacaggttgcagacagcaatcctcttccacagacggggggtcccagagggccagacgcctgccccggacccacagcgggcaaggggagggacctgtaggggtggcctgtattcaggacgcttcctcctccggctctctggcgtggggggagacaggggaggtggacaaaggcccagtgggggagagacacggccccagcccccgcagcctgggaacaagaggagctttgtaggactctgaacaatggggcggggacactgggcgtccgacccgagggatgggggtggaggcccagccggggctgggaaccgggagggtgtcaggctcccgccccctccactgcgggacaccggccgggggcggggacgggaggggtctggggccccacattcaggtcccacaatggagctctgtgtgtcggtagggtgggggcgggggcacggcttctcgcccatcctccagcctccctcccacattcccttacttccctcccagctggcccgacgcttgggtcccgggtgggggaaggccgagagctccaggctcagcgtccccccaggagatggtggcagctgccccccttgtacccttaggaacccccaggaggtgggggcggagaacgtctcagcactgaagggttggcactgcaggccccaaggaccctagggcaccctaggacaggtgccaggagggctgcctgcctggcaaaggatgcgggggaagggtgtggggcaggcagtcctagggaggggaagacggcccatcccggagctgggtgtgactggggttctgctccagggaggtgcgagttaaatcgggggctccctcccccccaccactccacccaccattaacatcacaatgacgtccctccgctgggggagtgaggccttcccgttcccttggcaaccgacgggggccaggctgaagtcgcccttttcccacgggctggcccaatgaggtggggctgagatgggaggggtggataagaaggcgaggtggaggggatggggtgggaggggacggtggcccccggggtcctgggacccgctgagattcctctccctcctcctccgctcagcactggcattggcatcggtttctatggcaacagtgagaccagtgatggggtgtcccagctcagctctgcgctgctgcacgccaaccacacactcagcaccattgaccacctggtgaggggccagcaaccagtgggaccccagacccacacctggacgggctccccacacccaaggacaaagggatccaaactcagagctaagaccccaggcttgaagcttaggaacccagattcagaacttcatcctgagacccacagacctcagactatccacccaacccccgaccctggctgcaaattgaggacctcacacacaggcccagccctggaccttacctggaacccccaagccacacagaaaccaagcaccagcgacaccagcccctgtccacgggccagatccagggccccagacctgattcttggcccgtaagcaagctcagggacccccgccctgaggcccaggtccccgacttgaggcttcagctccgacatcagctccaggattctgggccctggggctgaggcctggccccacttcatgccttagattccatgtccagctgcagactctagaccatgggacccagacttgagaccccagattctggaaggcagatgaaaacttcagacctaaagctccacacttaatctcagtcctggggctggacttactaccctgggctcaagctaccaaccatccagagctctggatagaggccacagaactccatgaacttgatcttgaagcccctccccaatcccttcccttactcaatcctcagatgtcccagactccagatctcagacacccgctactatgcacccctccttcacttctaaaaccccatgcctcgaccgcgggctccccccaggatgtccttccagacctcagcccctgtcctatccccaggtgttggagacggtggagaggctgggcgaggcggtgaggacagagctgaccaccctggaggaggtgctcgagccgcgcacggagctggtggctgccgcccgaggggctcgacggcaggcggaggctgcggcccagcagctgcaggggctggccttctggcagggagtgcccctgagccccctgcaggtggctgaaaatgtgtcctttgtggaggagtacaggtgagacgctgctcttcttgctctctgtgccggcagctctcaggcggagtccccggggggacagttggcaatgcctggaggcagttttggttgtgacagctggggagtgtgtgcgcactgctggcatccaatgggtagagcccaggaactgttcaacaccctgcaatgcacaagaaccccctccccacccattggcagggaatgatccagccaccatgacaattatgacgaggctggccaggcgcggtggctcaggcctgtaatcccagcacttttaggaggccaaggtgggtggatcacctgaggtcaggagtttgagaccagcctggccaacgtggagaaaccccgtctctaccaaaaatacaaaaattagctgggcgtggcggcagatgtctgtaatgccagctactcaggaggctgaggcaggagaatcccttgaacccgggaaatggaggttgcagtgagccgagatttcaccattgcactccagcctgggcgatagagtgagactccatctcaaaaaaaaaaaaaaaaaaaaaaagatgaggttgagaaacctactgtggagggacagatcaccagaccccatggccatcctgacacccatgtcctcacccattcactcactcaccccctccacgtcactccactcacttattcacacatgcgttcattccttgactcactcattcagcaagtcactcttggactcagttactcctggactaacccagcaggccactcactcagtcgttcatccgtgtgacatgtgtatttgttcagcactatttttttttttttttttgagatggagtctcactctgtcgcccaggctagagtgcagcggtgcgatctcgactcactgcaacctccgcctcctggattcaagcgattctcctgccgcagcctcccaagtagctggcattacaggcaggcgccaccacgcccggctaatttttgtatttttagtagaaacggggtttcaccatgttagccaggctggtctcaaactcctgaccttgtgatctgcccgccttggcctctcaaagtgttgttcagcactatttatttagcaccctctggtgaaagaggcagcgtacctacagatcaggaacctgagctcgaaagccagccagccccaccctaaccacgcggctgcaatcaagttactttgcagacctctgccttggtttccccatctgtgaaatgggaatcggggcagcgtcccccttgttgaattggttcgagttgttgagttggcatctgagtgctgagaaggacgattagcacagggagagcaccgcagagatatgaagtgtagtcaccccggtggcgggccgggcagtgagcaagtggcagaaatccctgccacgtggctgcgtcctccggggggaaccagcaagggacaaacgcagagaaaaacattgtaaggtgttgggccatgagaactttggagaaaattacagaggggaccaggcacggtggttcacgcctgtaatcccagcactttgggaagccgaggcaggcggatcacgaggtcaagagatcgagaccatcctggctaacacggtgaaatcccgtcgctactaaaaatacaaaaattagccgggcgtggtggtgggcgcctgtagtcccagctacttgggaggctgagacaggagaatcgcttgaacccaggaagtggagcttgcagtgagcagagatcgtgccactgcactccagcctgggtgacggagcgagaatccgtcttaaaaaaaaaaaaagaaaattatagagggagatgaggtgggacagagtctggcagttcatcagggggactgagaaggtggcatttggaggagaggaggcagtgagctgtgcagtgtccaggcagccacccttcccagcggccaccatgacggtgtcctcattgctttgaccattagtaatcattcattcattcattcatttatccgacgtcagctggaggccctgcccgcggggcatgcgctgagatttgggaggccttccgggatgctgcgctccagcggggaaggccgactggggctgaaaaagctggaggtcaggacacacccgcagggcagcaggtgcaagagacagacaggcctgggtttgaagaagtccaggttctgcattgtggtcaggcccaggggctgcacaagccgggcctcagctccttctcctgggcgagggcagggaagtggtgggagccataagggtgatgccagggtgaggcagacccaccatcactagaaaatatcttccgggtgcaccactgcgaaagcaccccacacttgggagtccctcgacagacaaatcaggggcctccaagggagtcttgctggaggggagcacttgcgaggctgggcggaagcagccagagaccagggtaaggagtgaagcccaagcttgtggggcctgcagagaatggcaggaggattaactgagcacttactacgtgccgggcactgtgctgttgttacggcgggtccttgctcccggagctcccaagatcgtggtggccacttccaagagggcagcaagcctcgtgttctctgacctggggttcttggcctcacggattccaaggaatggaatcctgggccctgcggtgagtgttttagctctattagaagccgtgggtcacggaagagaaccgtggaacccagcgaccagtgttcagctcgatcaggatgaacccaggcagttagctgtgcaggaacaatggcgagcctctagcccgattgggagcggcaatgggtgtctccctggatcacgagcacagtggacaccctgccggatccggagggtggaagtcagcggcgggtctgcgacggcggcaaacagcagtggtggacggcgagcgaaagctcagctcaagccgtaacagacacggaccagaagagtgtgcagtttcaagttttaatagagtgaaaacagagttcccatacaacgggaggggacccaaagtgggtagccgttgctggctggaatgcctgggtttctatccagatcattgtcccttcccctgtgctctcaggtgatagatgattggctatttctttacttcctatttttgcctaactagcactttagtgagctctctttactacctgattggttgggtgtgagctaaattgcatgccccgtgtttaaaggtggatgcggtcaccttcccagctaggcttagggattattagtcggcctcggacatccagctagtcctgtctctcactgtggcttgcatgcttgcacctcctgaatcatggtggtgggcccttcactgatatttaaggattaactttttttttttttcatttttgagactaagtctcactcttgtcgcccaggctggagtgcagtggtgcaatcttggctcactgcaacctccacctcatgggttcaaatgattctcctgcctcagcctcccaagtagctgggattacaggcgtgcaccaccacgcccggctaattgttgtatttttagtaaagacggggtttcaccatgttggccaggctggtctcaaactcctgacctcaagtgatccgcctgcctcagcctcccaaaatgcgcggattacaggcgtgagccacctcgcccggccaagtattaactattaactaacatctcagttccctcgttcacgctcaggctaacctctaagtgtgtccacgtgcttggcactctcctaagcacttctagtcatgcagcccactcgaggcaatattctcaagccagtgttgttgtgctccccacgttacatgtagggaaactgaggaacgagaggctaaggttaccgagacaagagttacccggccagttaagcggaggggctggggttgagaccaggcagcctctgcctccagacgtcatgccctccagggatgcgatgggatctttggtgcagtcttgagaacgagtatctccactctgcagggtggggttggggatggggagctcggagagaacacatcacgtgtccctggtcacagggcacatgtgtgtggcccggccaggggatagtcccaggtgctcaggacctgtattctaaaccgctccagtgtcctgtctcatgataacactatttcacagaggacctgggctgtggcccagacacagtaaacagcaggaggctgagcttggagggtggtgaatgtgaggctgagctggggggcagggtgaatgctggtggagggttgctgttccgccggggtgcctggaggcaggtttgtggtttcagccctaccctctcccctcccaggtggctggcctacgtcctcctgctgctcctggagctgctggtctgcctcttcaccctcctgggcctggcgaagcagagcaagtggctggtgatcgtgtaagtgcaggcagtagggggacccagtgcttgcctggcactctcctggcaggcaggacctcagtcttacaactctcctacacggaggaccgtggtccttcacggccgggtacacacgaagaaaagagagtcagagcagcccaggagggaggcggggacagacctgaaaacaggcagccctaacagtatgaagtatgctggaatcatggcagaaataatcattgtgttggcaataaagatgaggatgaggccaggcgcggtggctcacacctgtaatcccagcactttaggaggccgaggtgggtggatcatgaggtcaggagtttgagaccagcctgaccaacatggagaaaccctgtctctattaaaaatacaaaaattagctgggtgtggtggcatgcgcctgtagtcccagctactcaggaggctgaggcaggagaatcgcttgaactcaggaggtggaggttgtggtgagccaagatcacacaccattgcactccagcctgggcgacagagtgacactccatctcaaaaaaaaaaaaaaaaaaaaaaaaaggctgggcgtggtggctcacgcctgtaattccagcactttgggaggccgaggagggcggatcacgaggtcaggagttcgagaccatcctggctaacacggtgaaaccccatctctactaaaaatacaaaaattagccgggcgtggtggcgggcgcctatagtcccagctactcgggaggctgaggcaggagaatcgcttgaacccgggaggcggagcttgcagtgagctgagattgcaccactgcactccagcctgggcgacacagtgagactccatttcaaaaacaacaacaacaaaaaaaaaaaacagatgaggatgatgatctattgagggtcatgcacgctgagtccttcagttgcctccaccccatgaaggagctaccataaggctccatgtggccggtcagggacctgactaagagcgcagagggtggccaagtccaagactgagccgtccttaagtgtcgtggcaaagccgcaggaccacactgatttcacagctcgctctacgcgcccgacactcttctctgcactccctggagcacctcatgccccctgtgaggaaggtgcttccttctgcctgttttttatttctgttttttattttgagaaggtcttgctttgttgcccagactggagtgcagtggcatgatcacggctcactacagcctctgtcccctgaggctcaagtgatccccccacctcagcctccagagtagctgggaccatgggcttatgccaccactcccggctaagtttttttttttttttttttttttttttgagctgcaatttggctcttgttgtccaggctggagttcagcggcgcgatcttggctcactgcaacctctgcctcctgggttcaggcaattctcctgcttcagcctcccaagtagctgggattacaggcgtatgccaccaaacctgtctaattttgtatttttagtagagatggggtttctccatgttggtcaggatggtctcaaactcctgacctaaggtgatccgcccgcctcagcctcccaaagtgcctggattacaggcatgagccaccgtgcctggcctaagttttgtatatttttgtagagatggagtcttgctatgttgcccaggctggtctcgaactcctggcctcaagtgatcagcctgcctcagccttccaaagtactgggtttacaggcatgagctaccatgcctggcccttctccctgtttaacagagggagagactgaagatcagagaggttggaccacttgctcagggccacacagctagaagtgctagagctgggatttgaaccagacaggccattctcattggaggagtccctgcattctctctggccctggtggggtgaggcagagttgaacctgtacctccattgcccctgagagagtgggagagaccccgcgtaaggcttgcagacccataaacctagccaacacagggcaggtctgggactggaagccaggccttcagtttggggacccctgggtgcccttcttgcttactggtcaccctaccaatgctgacacgccccctgcacccctccccacccggaaagtccagagactttcagatttcagccctggcactgtctcccattctcagaggagacagggcagagccagaggctgatcaggctgtgggtggacttgggggagccttcgggggaagtgagcccagaggtgagcagtcaccgtcccagggtcctggagctgggatccaagctgcgaccacccagcccagggccctgctcataccccacaccctgctcatctgggcaggagccagatgtccagctggacatcagcagccactggcctacccccaaccactgaacttgtgtttccctaattctgatcctccaggctccagaggtgggtggaggtggggggcggctgtgatgggatttggggtgtggaaagaggctaggctaggagattaagaaccccgggctgatcctccctcccccactctaggatgacagtcatgagtctcctggttctcgtcctgagctggggctccatgggcctggaggcagccacggccgtggtgagtgccagggccgggccattgggctctgggactcagggggcctggagacttcaacttctggatctcgggatggcatggcttagtagagaaaggaattggggggcacgatcacagctctgaggtttagggcttgtttcctggggcctgagtgggtacagattggtgtcctggacgtttgagctgtaatggaggaggggctggaaacctggattcctaggtctgagggaggaggggctgggggtctggactcctgggtgtgagggaggagaagctgggggcctggactcctgagtctgagggagaaagggctggagagtctgaacccctgagtctgagggacgaggggcctggggcctggactcctgagtctgagggaagaggggctgggacctggacccctgggtggggaggggagctggggagccaggcactgggtgctgtgggagtgtggaatcggggcagttttgggtttgagccccttttctgctgcctcacgcagggcctcagtgacttctgctccaatccagacccttatgttctgaacctgacccaggaggagacagggctcagctcaggtgatttccaagggcccggtgggtccgccgggttgggcagtgcaggccctggcttcctcaggcctcctctgtgcccggtcctgcccagggtggggtgggggtgcagcctgccaggcgagacccagccctctggaagggaagcagggctcctggccactccccagctcggagccctcctggagccccgccacccgccagaccctcatcccttctgctccagctggcagcgcctctcctggtgggctggaaaagagggcaggataaagataatggtgccaggaagagagaggagggtcaggagagggtgctcctgggcgtcaggaatggggagtttggccccctggagaaaactggggagcaccatttagtcaggggttcccagggagtatagggttgcccaccagcgcctgctctggctgtggcaggagcagaagggacgcggggctggcgggtctctgaaggtaaggccatcgggctccagggctgggctgaggcccctaaccctgctaaccccccagtgcccggccttcccccgggagatccctgggggcccaggctcatggcctcctcccctctcctcctcccacttcagacatcctgagctattatctcctctgcaaccgggccgtctccaaccccttccaacaggttagggctgcgggcaggggaaacgggtgttgagggagccagaaatctggactctgaagggagggggcggggctggggctggggcctggactcctgggttccggggaggatgcaggccaggggcccgagtgctgtgtccggaggagaggagagagggccgggggcgtatactcctgggtcctcctccctccctttctctttctgcagaggctgactctgtcccagcgagctctggccaacatccactcccagctgctgggcctggagcgagaagctgtgcctcagttcccttcagcgcaggtcggtgggtgggcgctccccagacacgcggaccccacggggaaggcggacggggcgggatggagctgtggggcgtaggcggggctgcagagctaggcggggccttgggttgtgggcggggacgcagggcggggccagggcgatgggcgggcctgaagagttcgtgggaaaacgacccctcctcgccccgcagaagcctctgctgtccttggaggagactctgaatgtgacagaaggaaatttccaccagttggtggcactgctacactgccgcagcctgcacaaggtgaagcccctcccctcccaatttcttctcccacggggggcctctgtctcgacccacagaactacctcctccttctccttggacccctgccattgcgcctgaggatatctctgtatcctctgtttatatgatttatctgtcctatatctattctctacctatttataacctgtcgtctacctacctatcaagcattatccatattccttccctcctccctccctttccccccaactcccgcactccccgctgggtccccatcccaccctccccgtcccttcctgccaccttttccttccttgtcttctctcctctctccgtcctcctgcctctccctccctcctagaggctgccgcttagtgagttctggagcaagactgcctgggttccagtcctacctcctgaccaagggcaagtcacctaacttctctgtacctcagttagttccctcacttataaacctgggattgcaagagtgggcacctgtccagctcccctgcggcttgtgctgttcatacactggacaggcaggggtgggcagggtgcccaggaggaaagatatctggtgtcctgcaggctccagtttgggctctgccgcaggctgcacggccataggcaggtgagcgtggctgactctgcttcccacccgtaccgtgaggaaggacgagttttttttgtttgtttttttttcactggatggctgtgaggattgaaaaaaaaaatccccttataaaacagtaggagctggccgggcgcggaggctcacacctgtaatcccagcactttgggaggcccaggcgggtggatcacctgaggtcaggagttcaagaccagtctggccaacatggtgataccccgtctctactaaaaatagaaaaagttagccgggcatggtggtgggcgcctataatcccaactactcgggaggctgaggcaggagaatcgcttgaatccacgaggcagaggttgcagtgagccaagattgtgccactgcactccagcctgggcaacaagagcgaaactctgtcacaaacaaacaaacaaaaccagtaagagctgttctaaaacacacacccgaggatgcctttccccggccagtcttcccatcaaagacctcacatgtgcatagcttcaccaagtacctgaccctgttgcatttcacaggtggtaactcatcgatgcctcataacaatgctatgaagaaggaactatgattatcccacctaacaggttagaagatgaggagcagagttgagggaccttcccaaggtcacacggccagccagcccatgcacactgaggagagagggaccttccggagggccccgccctctgccccccacagccaggcagttgcccagttttgtcctttctgcttctggaatgtcttcatccatctactctcaatgcccaatgcccctgccgcagctgaggcctcgttctctcccctgcagaaggaagcatggccccctccccatccatccccccatggaccctagaatagggctgccagattcagcaaacagcaaaccactctgctataagtacgcccggtgcaatgctggggagatacttatactagaaaattatgtattgggcatccgatactcaaatgtaactggaagtcctgaatttgatctggcaaccctacccaagagggatttgtctacgccatcgcatggatctgagctttccctggtctggctcagacagaccccttctgtggctcccactgcctcccacccttctggaactggcattccaaaaagggagtggggagtaagcactgaagccatgctcagaattgctgactattgagctgagaaaggctgggcccccacccagcccagggctgccctgatcttttgcataaggataaactggggttcaggcgcttttctgtggcctaggcagaaactgggctggaatacaggcccccagactcctttgtggagggagggaagggaaggaagaggacagatcactctacccttccctaccactgcaccatgagaccctgggtctccatctcccctgtcagtgtg[133 bp omitted]cagcatggcgaaatcccatctctactaaaaatacaaaaaaactagccgggcgtggtggcacacccctgtattcctagctactcaggaggctgaggcacgagaattgcttgaacctgggcagtggaggttgcagtgagctgagatcgagccactgcactccagccggggtgacagagcgagaatccgtctcaaaaaaaaaaaaaaaaataggagggggctagggatgggtgcctcgtgcctataaacccagcactttgggaggcccagtggggcagatcagaactccttgagctcaggagttcaagaccagcctggccaacatggtgaaaccccatctctattaaaaaaaaaaaaatcaacaataagggacatcagggatgaggatgaaggagggagggcactggagcctaagagaatcagctccaatatcgcttctgccccttccagacagtgtgactctgggcaagtagcttgccttctctgggctgcaacttctttccaccattgcaagaggcggcagcgtgagagggtcagtgtctgcctggcagggctgttgtgaggatgaaggacagtgtgcatgtaccaatactctcaaaacagagcctccattgccccgacaggtccgtaccccaaccctcactggcttagtaacagacaccccacctcaaccaggtgctcctgccagaaactcaggctcttagctcccacaaccattctcagaacaagttctgttggcccttcctctgaaacctatatggactcccaccgctgttcctaccaccattgctgtgccctggtccccgcatcctagccaccatgaccacaggggcctcttccctgtcccccctcgcctacccccgtctgtcctccatgcagcagccagccagccaggtgatccttttaaaacacaatccgatcaagttcttcctctgcttaaaacgctcagtgattcccctcagacatggattaaaatccctgttcctcgccctgacctacaagggcctgggtggtcagtcctggatctgtctgcctctggcctcagcccctcccagcttcctctgcacagccctctgcctggctccttcctggaggacccatccctgctagtggggttacccgacctacccctgccctgcactgacccccgccctcctacctcgttgcacaccagcctctgagatgaccttctcggtcctgtttaccgaagtttcctggtactgggggcagcgcctggggcagagcaggctctgtcaacccccactgaatacatacgctgtgcaggtgcttagcactcggtgaaggccgtttctgctgatttcttgggacgacagtcatcagagccagcatttgttggcatgttgagtgtgtattgtgtgcgcggtgtcatcttgagccactggttggtttttcgacgtgctgttccacgtgctctaggccagtgattctgcccccagggacacctggctgggtgaggagttctgcccccagggacacctggccgggtgccgagttgctgttggttgtcacactgcaggagggggtgctcctggcatctggtgggtggagctgagtggggctgctcagcaccccacaacacacagggcagcgccgtcaccacagagaatgatctggctcaaaatgtcagcagggcccaggttatgaagccctcgcccctggaccaaggcggagctggcggtggctggcctgtgggcgcttggtgcaggggaggatgctcttgcaggaggtgccgctgccgggagggagaagggaaacggaagtagcagttctcacgttcctgggtagatgaagatggaggagagggcccagggctggtgggagatgctggactggttctagatgtggggtgctgactggggaggacccatgtgaaagggagataggggcctgcaatgacaagggcgggtgcagctcaggagaagccaagtctggaggctgggcaattaattcctgagtgccaggcctatcacaccaaagaccccactgtacccactgtattctcagaactgccctttgacaggggaaactgaggcacagagtggtcagttgacgtgtgcagtaccacagccgggaggacggtcagactgatgtgcacagtgtgtgccgatgggggagggggtggggacgcatggcctgatgacgccctcccctcaggactatggtgcagccctgcggggcctgtgcgaagacgccctggaaggcctgctcttcctgctactcttctccctgctgtctgcaggagcgctggccactgccctctgcagcctgccccgagcctgggccctcttcccacccaggtcaggagcgggggagggtagggtcctggggagggaagaggaggggcagcacctggggaccacggtggcagtgggggtggggggtgcagcctcctgatgggtccccatcccgcctctctgccatgccccgcatcaaaccccagtgacgactacgatgacacagacgatgacgaccctttcaaccctcaggtactggatgcctgggtctgagggaggaggggcggggggtcctgaactcctgggtctgagggaggaggagctgagggcctggccgcctgggtctgagggaggaggggctggggcccggactcctgggtctgagggaggaggggctggggtcccacagtacaaagccaattcccactccattccctcctctcccccgctaccccgaatctcctagcaggaatccaagcgctttgtgcagtggcagtcgtctatctgagcccctcctcccggctggactggagcctggctcccctcttcggtgagcttccaagggccaccccagctcctgcagccgggcctctgcccccctcccgccctccgagctgctccaggcatgggctgcgtgcctcctgctgggtggatcgcaccgggcaggccctccagcctgcatcactgccctgtctctccctctctccgcagttccttccctggctgccggaggagaccccactaacccagcctgcctgggctctgaccactaacactcttggccatggacagcctgcacaggaccgcctccctgctcttggccactgtgctcccatttctgtccttggccttgggagtagctgagggggcagactagggagtagggctggcaggggagggggcagacagcctcgcctcgcacccttcatccctggctgccggtcccatccttggagggactaagctgggggtgggggacatgagtccccctgctgcccctgccacatcccagtgggctctgaccccctgatctcaactcgtggcactaacttggaaaagggttgatttaaaataaaagggaagactattttacaagcagctgggtcctccttatttctcctctcccttgattcggcctcctggccagggctgggacatcctccctgctgtcctctctcccccggcctcccagctgccaggaatttctgcgcctgtccaggctcagcaaggggtccaaagacattgttctttaaaaaaaaaaaaaaaaaaatcaaaaaacaaaacgctttcttctgattctaaaagtaatgcgcgtgtcctgacacaggaagacacaggcatctctggcacagaatagatggcctagaaatagatctaactgtgtgtgtgtgtgtgtgtgtgtgtatatatatatatacacacatgacagaagacagatttcaagtcagtgtggaaaggacggttggtttagcagcagtagtgacatatcggctctccatctggccaaaaacttctatagataagatgggtggaagatctagatgtatgcaagtaaaggcacagaagaatttctagagaaattaggagggtgggcatggtggtgcatgcctgtggttccagctactcgggaggctgagactccttgcttgagcccgtttcgaggtagcagtgagctgtgatcgtgccactgcactccagcctgggcaacagagcaagaccctgcctctttttttttttttttttttgtttttgagacggagtctcgctctgtcacccaggttggagtgcagtggcgcgatctcggctcactgcaagctccgcctcccaggttcatgccattctcctgcctcagcctcccaagtagctgggactacaggcgcccgccaacacgtccggctaattttttgtatttttagtagaaacggggtttcaccgtgttagccaagatggtctcgatctcctgacctcgtgatccgcccgtctcggcctcccaaagtgctgggaatacaggcgtgagccaccgcgcccggccaagaccctgcctcttaaaaaaaaaaaaaaaaaaagacaaaaaacagagagaggctggctgcggtggctcatgactgtaatcccagcattttgagaggccaaggtgggtggatcccttgaggccaggagtttgagagcagagtggccaacatggtgaaaccccgtctctacttaaagaaaaaaaaaattagctgggcatggtggcacaggtctgtaagcccagctactcgggaggctgaggcaggagaattgcttgaacccgggaggtggaggttgcaccactgtactccagcctgggagatcaagtgagactccatctcagaaaaaaacaaaacaaaacaaaacaaaccagagaaattaggagaatatttgtatattgtctgcatgtcatgtatctgggtagggaaaatggggagggaggagtttaagcaggagatcataaaaccagaaaggaaaagatagcttagttggcaaattatagattgaaaaacataccgtaaagtcaaatggcaaattgacagactggggaacagtgagtgtgtgcgtgcgtgtgtgtgtgtgtgtgtgtgtgtgtgtgtgtgtgtgtatgttaacagttatgatgcagaaatgttattcttaaaagatataatctacaaaagctttcataaactaagaaaaagacaacccatttaaaagtaatcaattgagttgaatactcaataaaaattccaacatcagtaaacagacaaaaagattcaaactctaataattgggaaatgcaatttgaaagaatgagaaactacactttttcactacctagacacaatgaaattaacaagagtggtgatgtcctgggcgggcgaggacctagaggaacaggcactcaaaacacttctcctgaggctgtgagctgccaccatcccttgaaaaaaaaaaaaaatgcgcttgtatgtgatcagatcaaaactgcatacaccccatgccccaacaatcctgcttttgggaattgatttacagaaaaagacacacaggcttctgaagacttctatttagagctgcctgttacaacgataccactttgatcagctaaaccctgaaaacaaacatgcacaaaaagagaagtccaataactgactgcacagcagggctctctggaagaaaccagctcttggctgagttgaggatgtgagggaaaagcctggcagagaggagctatcagagcagggtgtggcagacagcagtggcagagtggactgaaggagaggggcctgcacagtgaagggcccagcttatcattcaaggcaccccaggccaccatcctggccctgcttttcatgaccttcacggatatgggaaagtcacttgacccgttagacctcggttgcctctttgatcaaacgggtatcagaaatccaaaattccaaaatccacagatccaaagagctccaaagtcaagccatccccaagctcattgggcaggaaaacctgacctgtgttggtgggagatgacttacagacatgactgacacgcttggtgtgaacgttcacatacttccctgcagaaaagttaaccaggctgctgcacactgctgtgctgagcactgagggtgccgtgtgccctgtggagtagagatcatattgcctttgcaactgaaaaatcctgaatctcaacacacacctggctccgaggggatcgagttggtgcttggtgacccacagtgccagatgctggtgtacagcgtggggcctgctgctgctctgtgcctgtcaatcatttctattttgtgtactgcaaggagcgttcagaggaagctttagatatgtgggcctgacggtgggaataaaaatcaactgcaatttcagggaggggttctgggggccacatgcgttcactcactttttcctaaccatgtgggctgtctgccccaggcccggccctgctgctatgctgacttctttcctctcaaacactgccctctagtgcccctgagcccatttcccaagcacaggcatccgctggctgttgggcggctgcaaagtaccttgagactcagctgcttgatctcccatgccaatgagcctgggggtgatctctcaacaagaagttggccgggcaccctggctcacgcctgtaatcccagcactgtgggaggctggggcaggcgatcacctgaggtcaggagtttgagaccagcctggccaacacggtgaaaccccatctctactaaacacaaaaattagccgggcatggtggcgggcgcctgcaatcccagctactcaggaggc[137 bp omitted]aactttacaaaaggaaaatccagtgttatttttagaatgttacctatgggggcttccactgcgaccaggatggagtcacagagactggacttgaccccccaaaaatagagtaaatacaagaaaacaacagtggtcaagactctaccaagaaagtgatccctgaggaacgggaaacatcaaggcaagccctaaaattgccgctgggtcctgttgcaagtttctagaccacgggacagggagggaagactgaggcggagctgggaggactccgtgagcagaggagacaaagcagggagtctga[133 bp omitted]aacatggtgaaaccctgtctctactaaatatatacaaattcgccgggtgtagtggtgggtgcctgtagtcccagctactcgggagcctgaggcaggggaatctcttgaacctgggaggcgaaggttgcagtgagccaagatcgcgccattgcactccagcctgggcagcagagcgagactccatctcaaaaaataaataaataaaaataaaaataaattatcttggacttccagcctccagaactgtgagaaataagtgtttgttgtttttgagccaccagtccatggtcctctgttactgcagactagaatgccagggaaagaaccacctggagggactgaagcaaatagcgcctgagttctggggactcacacaggccttgacaaggcgctgttcctgccagaagaacctcataactgaaggaacactgggtagaacacggagagggtcttacatcagccgtggggaataagcagccctaacctgttaaacactgttctggtcctgcctgaggaatcttaaaagcaaaacctgaaaggatcaagctgcttccaagtaaggtgactgcattctcaaacaaagctcaagaatatttataggcatacaaaagtaacgagtgctcgacaaggtaatactgatattgtctagtatccaacaacaaagtcaccaaatatgcaaaaagcaggaaaatagggcacatcatgaggataaaaatcattcaactgaaacggacccaggagttagaattagtaggtaagaacattagaacaactattatactgtactccatacgttccaaaagttctttacagatacggaagatataaaaaaactcaaactggatatcaacagatagaaattacaatgtctgaaataaataatgtactggctggaacagcagatttttgttttttgggggagagtcttgctctgttgcccaggctgtagtgcagtggcatgatctaggctcactgcaacttccacctcccaggttcaagcaattctcatgcctcagcctcccaagtagctgagactacaggcacctgccaccacatccagctaatttttgtatttttagtagagacgggctttc[132 bp omitted]aaaaaaaaaaatctggaagacaacattagaaactgtccaaatgaaacatttaaaaaaatgatttttttttttttactttttagacagggtctcactctgtcacctaggctggagtgcactggcgtgatcatgactcactgcagcctcaacctctccagctcaagcgatcctcccactttagcctctcgagtagctgggactacaggcgcacaccaccatgtttggctaatctttaaaaattttctgtagagatgaggtctcaccatgttgcccagggtggtctcaaactcctgggctcaagtgatcctactgccttggcctcccaaagtgctgggattacaggcatgagccaccatgccctgccccagaaggaatgaatatatttttttttaatgaaaagaacactggtgagctgtgggacattttaatatatgtgtaactggaggcccataaggagagagaaagaaaggaacagagagagtgtttaaagaaataataaccccaaatttcccaaatttgatacaaactataaaaccaaagatacaagaaactcaacacaccccaagcagaagaaacacaaagataaaccaagatacatcataatcaaatttcttaagaccagtaacaaagagaaaatcttgacaacagccagatgaaaaacaaaaagattttataaacagaggaacaaaaattaggatgacaccagatttctcactggaaacaatgtgagaaagcagtgtaagaaaattcttaaagtagcaaaagaaaaaagtagtcaacc[220 bp omitted]gaggcaggagaatggcgtgaacccgggaggcggagcttgcagtgagccgagatcgcgccactgcactccagactgggcgacagagcaagactccctctcaaaaaaaaaaccaaaaaaacaaaagtgaagacaaggccaggcgcagtggctcacacctgtaatcccagcattttgggaggctgaggcaggcgtatcacctgaggtcaggagttcgagaccagcctggccaacatggtgaaaccccgtctctaccaaaaaatacaaaaattagctgggtgtggtggtgggcacagagcagagatagaacagtatcataaggctgggcgtggtggctcacacctgtaatcccagcactttgggaggccaaggcaggcagatcccgaggtcaggagtttgagaccagcctagccaatatagtgaaaccctgtctctactaaaaatgcaaaaaggagctgggtgtggtggtgcacgcctgtaatcccagctacttgggaggctgaggcagtagaactgcttgaacctgggaggagtaggctgcagtgagtcgagactgtgccactgcactccagcctgcatgacagtgagactccgtctaaaaaaaaaaaaaaggtatcataaaaaatgctcaaacttccaaacttctctccacaaatggtgctagaacaactggacatcaacatgccaaaaataaataaatcaaatctatacacagaccttagtctcttcacaaaaattaactcaaaatggatcatagagctgaatgttaaatgcaaatctataaaactcctagaagataacataggagaaaacctacatgactgggttttgtgaatttttttttttgagacaagagtctcactctgtcgcccaggctggagtgcactggcagaatcttggctcactgcaacctctgcctcctgggttcaagtgattctcatgcctcagcctcctgagtagctggaattacaggtgtgcgccaccacgcccggctaatttttgtatttttagtagagatggggttttgccacgttggccaggctggtctcaaactcctggcctcaagtgatccactcacctcggcttcccaaaatactgggatgacagctgtgagccaccacgcccagccgtgataatttttttgatacatcaaaggcatgatccatgaaagaaacttacaagcttgactttattaaaataataataaaaaaacccctctgctaggccaggcgtggtg[131 bp omitted]gtggcaggtgcctgtagtcccagctactcaggaggctgaggcaggagaatggcgtgaacccgggaggcggagcttgcagtgagccaagatcacgccactgcactccagactgggcgacagagcgagactccatctcaaaaaacaaaacaaaacaaaaccctctgctctttgaaaaacatttttaatataatgagaaaagctgcagcctgggagaaactatttgcaagagacctatctcatgaaggactgctatccaagatttacaaagggctcttaaaactcagttaacaggaaaacaatctgattaaaaaataggaaaaggggccaggcatggtggcttacacctgtaatcccagcactttgggaggccaagacgggcaggaatttgagaccagcctggccaatatggtgaaaccctgtctgtactaaaaatacaaaaattagccagcatgatggcacgtgcctgtagtcccagctactcgggaggctgaggcagaagaattgcttgaacccgggaggcggaggttggagtgagccgagatggtgccactgcactccaacctgggtgacagagtgagactcggtctcaaaaaaaaaaaaaaaaaaaaaaaaaaaaaaaaaaaaaaaaaggattgtttctgggtgtgtctgtgagggtgttgccagggaggctgacacttgagtgagtggacggggagagggagacccactctcagtgtgggtgggcaccatccagtcagcgcagaaggtgggaggggctggcttgctgagtcttctggctttcatctttctcctgtgctggatacttcctgtctttggagattagactccaggttctttggcctttggactcttgaacttccaccagtggtttgtcggggactcttaggccttccgccacagactgaaggctgcgccgttggcttccctacttttgaggcttttggactttgagacgtgactggcttcttccttcctcagcttgcagatggactatagtgggactttgcctgatgatcctgtcagccagttctccctaatatactccctttcaatatatacatatatcctgttagttctggccctctggagaaccctaatacagatggcaaataaacacaggaaaagatgttcaccgtatgtcattagggaaccgtccgttaaaacaagacaccactggccgggcgcgggggctcacacctgtaatcccagcactttggaaggccaaggcaggtggatcacgaggtcaagagatcgagatcatcctggccaacatggtgaaaccccgtttctactaaaaatacaaaaattagctgggcgtggtggcgcacgcctgtagtcccagctactcgggaggctgaggcaggagaatcgcttgaacccaggaggcggaggttgcagtgagccgagaccatgccactgcactctagcctggaagacagagtgagactctgtctcaaaaaaacaaaaaaaaaacaagacaccactacatacctattagaatgccaaatccaaaatgctggcaccaccaaatgctggcagaaatgtggagcaacagaaacccttcttcattggtgctggcaatgcagaatggtacagctactttggaggacagtgtggtggtctctcataatcctaaacatactcttagaatatgaaccagcaacactgctccccagtatttacacagatgggttgaaaacttctgcccacaaagaaatctgcacgtgcacgtttatggcagctttctttatcactgccaaaaacttggaaggaaccaagatatccttcaataaatgtcttactacattctggttgttgtaacaaaataccatacactgcgtagctgaggcaggaggatcacttgagcctgggaggttgaagctgctgtgggctgagacagagatcacatcattgcactccagcctgggtgacagaatgagaaaccctgtctcaaaaaaaaaaaaaaagtacagttttggtttttgctgtgactgggctcctggagtgagagctctggatcccagctgcaagatgaggaatctggagccgagagaagggaaacgagttttccaagtcatacggctggttaagtaaaagagccgggattatgacttaggtttcctgccccccaagattattattttttgaaacagagtttcgctctgtctcccaggctggagtgcaatggcatgatctgggctcactgcaacctccacccccagggttctagcgattctcctgcctcagcctcatgagtaactgggattacaggcatgcgccaccatgcccggctaatttttctgtatttttagtagagacggggtttcgccatgttggccaggctggtcttgaactcctgacctcaggtgatccacacgcctcggcctcccaaagtgctaggatcacacgcatgagccaccgcgcctggcctacccaagattattaaaataagttttcagaagcaaccccctactggccaggcgcagtggctcatgcctgtaatcccggcactttgggaggcagaggcgggcgggtcacctgaggtccggaattccagatactgtgaaaccctgtcttcactaaaaatacaaaaattagctgggtgtggtggtgcacgcctgtaaagagaattgcttgaacctgggaggcaaaggttgcagtgagctgagatcgtgctactgcactccagcctgggcgacagagccgtctcaaaaaataataataataatagattttttaagaaaagcaatcccctagtgacttcttagagcacatcatcagacagttggggtaaaattctgaagtggattaagggaggggtgctggtttgcctggatggctacatgaacatagccctggaaccaaccaaatatgtaactggacaacagaaaaataagtacagggtgcattaatcagaggcaacaatgttttgtacttaagtacacagaagacacgatgtgaagacaccaagagaacagtacttttcatggttagacacatttcttaggtattttttctactttgggattcttttgtgatataatttgtcctgtttacataatttttttccctgacatgtaagataaatgtatctaattgtgggcttacttgtaaagagttttcacatttaagttccagtcatttcattttatcgctgtatctgtgtacagaatgctaaagaataagacataaaaaataaaagtacagttataaacacctcttttaaaaggcagagactgttcgcttgggcaaaaaaaagcaagatccaactacatgctatctacaagaaacccaccctaaatacaacaggtaaaaggaagctaaatggaacgtgggtcctggcttgtaccctggcatgtaaagaaaacattggaggaaaaggtggtgaaatcccagtaaagtctgggttttagttacagtaatgcatcatgtcagtatctacaacaaaccacttttgttggtgcttgtgatgacagcatcagaagaaagtgggcataaaacatggtggactgcttatgatctttgcaacttttcttttttttttttttgagacaagaatttcactcttgttgcccaggctggagtgc[132 bp omitted]agacgggacttcaccatgttggccaggctgatcttgaactcctgaccccaggtgatccacccatctcggcctcccaaagtgttgggattacaggcgtgagccagcgcgcccggtctttgcaacgttttgaataaatccaaaattattccagaacaaaaagcttagtaccaaaaagaaaacaaaaacaaaaacaaaacaaacccccccccccccacagagtaaaataacggaaaaagatctactatgctagcactaacaaaataatacgtagttatgaaaatggtatgtatttttcaagctagacgttcataatggtagaacatgaggaggaaaactgcctcttaaatcccaccacttactgtgacacagtgaccggtccctgcagcggactggatagttgtatcagagtcctggacggaaacagatggcactcaaaaggtggcgcgcagttcagagaaatgcctatgtacggatttggtccaatgcctcagcctgacctcagggaccttcgggggtctgctccgcgcccacccttacacatctgtgaccccacacacttccaccccagcgccactgccaacagctacacccatccccctccaaccgcgtcagcttccagcctcggtccatctgaactcgccgtgccccctcccctgcgcccttccagattcatttgctagggaagcccgctcttccgggtggagctgttcctcatcccctttctttatcattctctccccagggcttccacatcaccgtgctgtggacaatcccggaactcctgtcacgccagtttacatttaggaacagtaatggctcccactgactcagtcaaaacaaggctgcggccgggcacggtggctcacgcccgtaatcccagcactttgggaagccgagacggagggatcacgaggtcaggagttcgagaacagcctggccgacatggtgaaaccccgtctttactaaaaacacaaaaattagccgggcatagtggcgcgcgcctgtaatcccagctactccggaggctgaggcagaattgtttgaacccaggaggcggaggttgcagtgagcagagatcacgccactgtactctatcgtgggcgacgacagagcaagagcaagactccgtctccgagaacaacaacaacagcaacaagaaaacaacaataaaaaaaataaggctgcgtgggaggcagaaagagctaatgcggccacgcttgtctcctcggggccaccgtccccacccagacttccggtctgccttaaaatgttcatgcgtaagtgcgtgggcaggaaggcgggctcaagcgcagctcgtggcgttcattggctgtgcagggccgagggaggcggtgcaaggccgccgcgtgacgtcaggacgccgcggtcaggacgtcgaagccaaagaagaccagagccagccgggtggcacagcggtgtcgtggccgtgttgctgatcgcctgggtggttgttggcgtgtccctgcagcgaaggatcctggttggtaaggggagcggcaggcgagcaggcgggcggggatagcatctccttttggtcttgcgccccgcgagccccgaggccttctcggccgtcgcagcagcagacgccgcgcgcgagcgtcgacagggtgtggcggcgcaggggcagccactgcgcctgcgcaccgggcctggggccgcgcgttcgggcactagcgcgcgtgcgccgtcgtcttctaatttccgttcctctcccttggagttctcggggccccggggcgcccctcactcgccgttgaccgggtgttgccccgggcgacgggcggctcctgcgcgtctttctggggcgtggtgcgcaggcgcggcctgggcagtggctccgtggctagtcgtggggatccgagcggcctcctccacccggcgtcctcctttgccttcgcccagcctgcgggacggccaggtgctcccgggacctcaggcctcgcgtctgatgcctgtctctgttcttgagacccgtccgggagtcctctgtccagcccccaactcctgaccttacctctaatctcccttctgccctggggctcctcttcctgtgtccccgccacgatccctcgtctccacccacgccctgtgtcctgtttaagttaagcctttgcgtttctagggcttttccccagctccagactcccgttcctatcccgtcaactcgtgggaattccggttctcctgcgggattaattatcctacttatcagttactccctctcgggagtttaggctcctgaatccttgctccggagacactccacttttcttccaattctctctgtaccccactcttaattcgttgaacatgttttgggtcttctttggcattcccaaagctttatgtccagacacccaaccacggtgatcccttttctctcccagccctacccctgcttccgggaacctcccgtggaagcaggcaggggtagtcccactgaggactcccacgtaggtctctttactgcccttcggagacctttttgaaatcagtctgtcagtgctaagaacccatttcttcacgttggggttcacgttggcattctcaggaacgctcaacgaccacttgcttccagggttaacttccggaaaatccccttttcctctcaaaattttcttctcttctccaatattcttccagccccctcgatgctccctgaaaggcctcccttttcacagagttctcggaaacctttccaccctctcagccttaagggttccctcagactcttctcattat[131 bp omitted]gccctccgcctcccgtgttcaagcgattctcctgcctcggcctccctagtagctgggattacaggcatatgccaccatgcccagctaatttggtatttttagtagagacgtggttactccatgttggtt[133 bp omitted]cctaccctctggacctttcatcacagcctctctttgctcacatgggtttcagacccttctccttccctttgggaagtctgctctggcttccctgtttccaaatccttcgttttccacctggagctctacaaaggggccaggggcttcccctcactccagcctttctagtccacacccagaactcttcagatccttgaccccagtggcttttcagtcagcctccccttttctgcccggcttctcttgagtccatctacttttcttccccactttgtgacgtgtttttagctcccccttaagtctccctaactcattctttttctcatagacagtgaaaaagcagtctggctcccgaggtccaccccttataccccaaggtccagatggcggccaacgtgggtgatcaacgtagcacagattggttagtgaggcgagagggatggaggccagtcgggagggaaagaggaagcaagacccagtgctgtcctctggggtgggacctcccgtggccttaggggaggtgatgccacaatccctgtgggtgggggtggtggtgaggcaaacacagagggaagcatttggttgtggtgtggagaggggcaagctttcacctctctgagctttcgtttttcacagtacagcgcttgctttgcagaattgtgatgattcattcaagcaagtgtaattaggaggcagcttcccaacactcaatacacagtcatttatttgtttttctgctgattccttattttttctcaaaatagtgtgataacctgccgactggggtgatgtcagacagaattcattgattcatgaaagacatagccctaggaggtgccaaggcctgtgttcagttctgtgggttctgttaattgttttgtttgtttggttttaacaactgctgtgtgccaggctctgggataagtaccttaagtaggtgatctcatttatccctcccagcagactctgaagcagaaaccctttatcagcatagtacagattagaaaacttaggcttagactggtagtaacagttagatatgggatccaggggctggaatttgcctcccaacttgcccacctgtgtacagtggggagaacaggtgtgacttgatgtcctctctctctgcaggtcttctcagtacagcatggtggctggggcaggccgagagaatggcatggagacgccgatgcacgagaacccggagtgggagaaggcccgtcaggccctggccagcatcagcaagtcaggagctgccggcggctctgccaagtccagcagcaatgggcctgtggccagtgcacaggtgagaaggcctcatggggctggggtaccctgagccagaggttgtgggagggacacagtctggcgtcctgttgtatcattcagacggggtgctctgaggggaaacatgaaaagacgttccagggtatctaaatctgaacgggaaaaagttctgtttccttgaggaaattagggcgtgatgtggttctgaagagggaggccatgcccatgcccctggtctctaacgtgcgtgagtctcatggtagagacagtggctcactttgcagatacatggacccagtttcatcccttggcaattggccaccagtaaacaggcttgccctttgggggccgtgtgcctgtggatttgggctgctgacggcacatgtgcctctgcttccacagtacgtgtcccaggcagaagcctcagctttgcagcagcagcagtactaccagtggtaccagcagtacaactatgcctacccctacagctactactatcccatggtgagtgcccagccagtggggcggggcagggcgaggtggagtctgctgggtcggggcgaggtgaagtggagtctgccgggatggggctgggtggtggatggactggagatcgcagtgataactgctcagaaaccctctaacttgcccaggaggtaaattcctaggtccccgccatgagccacaaggtcctacatacccggttctggtcccttctctcctcatgctcattctgccatggccatcgaagcagagacctccttgatgcccgcacccgccaggcccgctctcgctttgccctggctgcagtgctccctgtgttgccgcctcttggaggtctctgctcagatgccgccttcagagagcctctacctgacacactgattgaaagtagcattcctgcctcgcagcctgtccctctccctttctttgccatcttattgtttcatgatccttattgctggatgtattacatgttgatgtctccagccggacatgtaattccagcacaagcttcattacagcatgggttttccttttgttctgtcgtagtgcttagaagagttggcactcagtatcgttgattatattcttccgagaactagctaagtgagatgtgggattgatagaggtttttcttttcctaatatatgagaggatgtggtgcattaatatagtgaagagagaaaggggtgagggattggtagagggtcatggctggtgtagttcctgagcaggctggggaagcggaaagggtaggcctcccactaaaccctccctccctgcgcctttgcagagcatgtaccagagctatggctccccttcccagtatgggatggccggctcctatggctcagccacaccccagcagccatccgcaccccaacaccaagggactctgaaccaggtaacatcctagcccagctcccataccctgctcaagcagaggaagtgtagatttttgaatgagctgtcaatgaggaatggcttgtactccttaagctgcttttttccttccaagcaactcctgatctgaaaatgaggaggacagagcatagtgtttgaacctggggtgggtttaaggctgagccaaggccagggctgagatgttgaaagacatctcatctttttccctagcatggtcacccacaggcgtgcacacaccggctgggttttgcattgaatgtgcagcttggaggaatggccgggctagtgcacaggaggcaggtagacctgggtttgaatcccagctgtcccacccctggtgtaattacgcatctcggtcagctctcgaaagcgggaaggatggtagcctcatccttgggctccatgagtgtgtgtgctcatgggtgtcttgtgctcagatggtagcgctggagtgggtgtgttgtcggtggctgttactccagcattgaaacgctgccagctgccgcttcatagcttagggccctgggaagtcgcttagtctctgagctggagccttgtcagctgtgaaaagggctgttaacaaatgttaacctcacagagttactgaggactcgaatgaactcacatttgggaaggtcacgggagggttgagtgctgagtgctgtgaccactgcgtcctcacagcgagggctgagtgccactcgccagccccagaatctgcctcccgtgctcagcgcctgcttccttctgcagcccccagtccccggcatggatgagagcatgtcctaccaggctccccctcagcagctgccgtcggctcagccccctcagccctcaaatcccccacatggggctcacacgctgaacagtggccctcagcctgggacagctccagccacacagcacagccaggcggggcccgccacgggccaggcctatgggccacacacctacaccgaacctgccaagcccaagaagggccaacagctgtggaaccgcatgaaacgtaagttggcagagctacgtggaggtccgagcggttgggccctcataagagctcctgggtgtgaggcccgtggtgtgtgctgctccttgtttctgggtgttgtgatcgccaggctgggggtggggctgctctggaccaggcacatgtgtgctggagccctcctctagaacctgagcgctcctccctgcatttccacttcctcccgtcccctggggacccctggatgtgccggggaagggcctaaccatagctttcgctgccctcacagccgcccctgggactggaggtctcaagttcaacatccagaagcgaccctttgctgttaccacccagagctttggctccaacgcagagggccagcacagtggttttggcccccagcccaaccctgagaaagttcagaaccacaggtgacgtctgcccccttgccccgtcgcagccccacactctgcactcagcgtctatggtccagtcccactggccagctgcccaccctgagcctcagtgtgcgcctctgaaaagggcagaaggaccctctcttgggggttgctgtgagcactgaaggagacagaaggaaaacttggggactgcgtcccgctgtgtcagctcagagtggcggtggggatggtcttttgagtttgggatcgtctccagctgagcccctcatctgtcctcccgcagcgggtcctctgcccgggggaacctgtctgggaagccggatgactggccccaggacatgaaagagtatgtggagcgctgcttcaccgcctgtgagtcggaggaggacaaggaccgcacggaaaagctgctcaaggaggtgctgcaggcgcggctgcaggacggctcggcctataccattgactggagccgggagcccttgccggggttagtctgggtgggggacataggtgggagggtggtgctgtgagaggcatgggctgggtatggaggtaggagagttgcgggtcccaggtaccaggagctccaaagagaaatgaactggaaagttggatcctggggggatgaagtcctggttggagggaggccggtggggtggggtggggaccatgggtgctggagaggcgtgcattgctcagtggttaagcgcaccctctggagacggaaaacctgggttcgcgtctcatttctgcactgtagtagctgagccgcctggggtaagtgcctttcctttcggaggcgggtcggtaccttgagggaggtggtggcggctgtcctgccagtgtctggcggggttggtgacgccctgccctgctgtattctcaggctgacccgggagcctgtggctgagagccctaagaagaagcggtgggaggccgctagcagccttcaccctcctagaggggcaggctcggcgacaaggggcgggggtgccccgtcccagcgagggacgcccggggctgggggtgccggtcgagcccggggcaacagcttcaccaagtttggcaaccgcaacgtcttcatgaaggacaacagctcttcttccagcacagactcccgctcccgctcctcctccaggtccccgacgcgccacttccgcagaaggtactgaggctcccggctggggctgtgtgtgagggagggggaggcgtttcaggcctgaccctcctgcttcttcctgcagtgactcccactcagactccgacagctcctactcagggaatgagtgtcaccctgtgggccgcaggaacccgccccctaagggccggggcggtcgaggggcccatatggatcggggccgaggcagggcgcagcgtgggaagaggtgagactgtgtgagggctcgacacacgggccagggtggaggagggtactggggacccatgggagaaggaggaggagggccggacaggtggacagccagctgccaaaggggcgaggctgaaggggggctggagacgcctgtcgcgctcactgcccctcatcccttcctaggcacgatctggcgcccaccaagcgcagtcgaaagaagatggcggcgctggagtgtgaggacccggagcgagagctgaagaagcagaagcgggcagcccgcttccagcacggacactcccgccgcctgcgcctcgagcccctggtgctgcagatgagcagcctggagagcagtggggctgaccctgactggcaggagctgcagatcgtgggcacctgccctgacatcaccaagcactacctgcgcctcacctgtgcccccgacccgtccaccgtgcgccctgtggcagtaagtgcccagcagggcagttctgctctgtgaggccgtgctggctcaggacttggggagccaacccagggagggtggcagaggccacacgggggctctggtatggcaggggaagctcggccagagacgcctcggctggtcggcattctgagaggagcgcaaaggcgctctgctgccctggagccccgcgtggcgggtgtgcagcttggccggcgaatcgcttgacctctgggccgtggttcctggcttaggtgacacggagcataaagccttctcccaggcccgtgggctgtggggcgtggggggctgtgtttccagtgtttggcgtagtcactgttctgctgcagaacctgtgaacagccatgtgcttatagggaaatgggtgtggaggtggccactcttaacccatgtcttgtgggtttgttttctctttttttgggagagagtctggctctgtcgcccaagctggagtgcaatggcgtgatcttggctcaccgcagcctccgctccccggcttcaagcgattctcctgcctc[222 bp omitted]taagtggaagccgttggccacgctacctgagttgtactccgagtgtgaattcagttccctttttcaggttttgaaaaagtcgctgtgcatggtcaagtgccactggaaagagaagcaggactacgcgtttgcctgcgagcagatgaagtcgatccggcaggatctgacggtgagactcgcgctgggaggggcctggcctcagccagtcctgcctcccgctccttgtgactcttgttctcgccccgctgccccaggtgcagggcatccgcaccgagttcacggtggaggtgtacgagacccatgcccggatcgccttggagaaggtgagctggcctctgcgggcctccccagcccctttcctgctgccgttctgccctcagcaccctcactctgctctcctccctcggtgcctctgccttccagggtgaccatgaagagtttaaccagtgccagacgcagctcaagtcgctgtacgccgagaacttgcctggcaatgtgggcgagtttactgcctaccgaatcctctactacatcttcaccaagaactcgggaggtgaggcccagtccccaggacagaggccatggtacccagggttgagccctgctgacttcaccctctttgtcttggtgctagacatcaccacggagctggcatacctcacacgagaactgaaggcagatccttgcgtggcccacgccttggcattaaggacagcctgggccctgggcaactaccaccgctttttccggctctactgccatgcaccctgcatgtctggctacctcgtggacaagtttgcagatcgggagcgcaaggtcgccctcaaggccatgatcaaaacgtatgtggtgccaagctcccttctgcctttgctcttcccatccttccgcctcgcaccgcccctcagaccagctcctggccgcaggcctcccccagcccccaacccttgtcctggtccttgcttccccatcatctttctccattcagccctcccctctccagttcctcttgctctccttgttggtcacctctgtgttccgggtcactcctctccctctccccactgttcccagctcactgcctctggggcctcttctccaccccatctgtgtgtctcttcctcctgttctctcctgcctggaccccctagttcactccttgccctgggcttcctcagaaccctgaggtctctgctttctcagcttgtcgctgtgctcccaccatagagaccatctagacagcctctggtctaccaggacaaggcccagtcccactcagctcctttgagagcaccagaaacgcttagggagacacctgtgttgaggccacactgggcgcggtgccagaggcccctggtcaggccatgcccctgcagtgtccttcgttcactagacattgcgcctggcttgctgtgggtggggatgagttgcttgactcatgtttagacgcatggttctgtctggtgattgaggtgcccaggcgacgctgggcaatgtcaagagaggttttcgcttgtcacagcaaggggatgctcttggcatctagtgagtggaggccagggatgctgccctgccactgccattgggcctcagagctcagtcttgccaaggtggagaaattctggtcgaagaggttgaccggtagactgaagaggccttgagagcctggccaggtggctgtccacgtgaggtcatagtcacagcatggaggccttgagagcctggccaggtggccctccacgtgaggtcatggtcacagcatgggggccttgagtgcctggccaggtggccctccacgtgaggtcatggtcacagcatggaggccttgagagcctggccaggtggccctccacgtgaggttgtggtcacagcatgggggccttgagagcctggccaggtggccctccacgtgaggtcatggtcacagcatggaggccttgagagcctggccaggtggccctccgtgtgaggtcatggtcacagcatagtttggagctagggagggactgtcagcctggaggtttggagactcattctggaatctagtgtgggtcaagccaacttcagggagaggctgagccagggtaggagtcacaggagcagacgaggatgtggggtgccgtgcacagagctccatgaccagcttgggaagttagaaggaaggggaggcaggaggctgcttagtctgctgccatgatgggccccatgaatggtggctctcaagcttctgtgctacacaggggtgtgtggttgggcgagtgtccttgttaattgatacctaattggccttggttgggaacatagccatgagtgcccctcgtgggtggggcgccagtctgtcattgacctcattgtgtcagcaccttccccccaaggaggctgaccctgccctgccagctgagactgggagacggagtgggctctgatcccagggcttccaggaaagctctggctttggagcagaagcgggttctaggacttagtgcccctcactcggtgcctgggttcctgtgtgtgtggaaagggtagggctgcaccctgtggaagagggttcagggagctctgaggacctggctcgtgctagatgctcagtcagtagtgtgttttagcagcagccggaagtgactgctttcagtgtgtagtggtgagtgctagctggcacccctgcgcctggcttcccagacactgtaacgcagggcaggggaggcagcgagggctgggtccccacggtggccctggcagccccgccatccccatcccctgccacgtgctgctccctccatctggtccctgcccctcagccagcggaggagcccgctgggcccttccctgcccgtccccgctcctccctggcccccgcacaggtaagtgagggtgaggggggcacaggggactggggtcactaaccccccccgggccccccccgagcccctgaggtggggaggctgggaggcgggtggggagccagcaggcactgtgctgaggaaatcctgtgggcacccgaatgggggggcctccccgctcgtggggccctcccctgccctcccgcccgcccgcctcatcaccttctcctcttgtctccatagcttccgccctgcgctgccagtctcctacctgcaggccgagctggccttcgagggcgaggccgcctgccgggccttcctagagcccctgggcctggcctacacgggcccggacaactccagcatcgactgccgcctcagcctggcgcagctgtcagccttctgagcacccagcgaggaggggcgggggcaggggctgcagcccccagcgctgcctttgcggattctgtttttgagccgtggacttgggttgtaaatttatttgtggggagtgcgctccaggaagagccaccatccctgcccccgttttcccaccggggagtctgtacagagatttttctacgtttttattttttgcctcagagggatgggattggggaggaggggatgggcagcggagggttgggggcatggtctgcaggctcatctgtgtccgcctttcactccactaatgctgtctcagtgttttctctctctctctttcgagcttgcactccggtacccgacccggcgccctggcccatcccatgccggggggccagtggaaagaagacaggccgtccagcccgtgcccgcctgcggcgggggcacccagcaagcccgcccaccgcccgctgcctcacctgcttcgccacagactcttgttcccagccccttggggcctccgtgtttggggtgggggagctgcttagagactgtgcccgtcctcggccccccaccctgaagtgccagcaccaccagcaccagatcctccgccgccacaccgcactgaggacacgccggccgggccgcctcgtctcaagttgtataaagttgtctccgtgtcccctcctccctctgcccccagtgtttcttctgatttttttttcccctttccctccctccctctccgcattcttcccttggttcagcacaggtaaaacggttcccctccctccctgccttcatggatcaccagctcacgtcatgttgccttctcttttctttgtgtgtgtgtttatttaagttatttttcttcctcctctcccttttctttttggccctccctccctccctcttctgccatgtaactggaggatgtgctatgagtttgcaaacagctggactgtcaggctgctttttttccagatgttcctcctctgcctccccttcccctcctctcccctccttttccttccttccttcctttccttggagcactgagcaccatttggaagcttgagagaaaccaaaattaaagagagaaagagagagcgtgcacgctcctgctttgtctttcctgtgtgggctgtttgcatccattgtctcctccagaggtctgggggtgtcactccagggggatctcagccaggggctggaaaggcccccctgtcctccctatacggcacagccagagtgtctgcaggggctggcaccccacttcctggctgagggtgaactccagcttggggaggtggacctgggaaccatggggcaccttggccacggtgaggtgggggtgcagctgccctggagactgtagtgtactcagcccctcggcttccagcctctggctcagcacttgtgccatgctttccagtgtgggagagggtggggcacacagcacatgcgggcccaggaggaccagctttctaaagctcagccgagggggtgcatttagccccggggccaagagggcccgtctcagagctccaatggcagcggcctcctccccagcgcctgccagtcgcagcagggccagggtcaggtgtaggttctgagagggcactaggaagttggcgcagtgtggggccacgtggaccaggtattcctgggccttggtcacttctgcttgtagcccaggctcggtcaccatgagggccacaaaatgtgtggggcgcggttggcaaggggctgcaacactaaggcgggcccttttgtcctcgggccaggccgcaggaccccactcggcttctgtcgtctcagcggagccccccgggactcccagggcctgtgcttccttgccccccagcaatgtggtcctggtggctgctgttggcttcagtgcctcagtcactccggcgaggcgtcctcttggggccagtgttcccaaatcagcagctgtgcccagcgccctctcctgggccgcctccagctctccgggttcctccacgcctggttcctggtgccctgtgcagagcggccttgtgctccctcgcttgggggcagcctgggcctcctgacctgtccccgccagtgtccactcggcaccctctgccccgtgggcgccctcggtgttcggtgcgtccaggatggtgggcccgcgtcccgccgccgagccagagccaaagacgaggtcggtgcgcgaggcgcggtcccacacaaggcggccacggaagcggaagaagcgcacgcggtgctggggcactgccagcacgcccggcccgagcgccgccagcggctggtcccagcaaaaggcgctgaagggctcctcgcgcacacccagaaagcggtcgacgtagcccaccgagaagtcggcggggtcgaggcgcgggtcccagcggatgcgctggatgacgtccgcggctgtgcgcagcggcggcttcttggccccggcctccggctgcgcctcgcggccaggcggcgccggcgccccagggtggggctggcggcagcgggcgccgaagcggcagcggccttccaggaagaagcggcaggccggcgggggcgcgggttccgtggcgggggcttcctgcggcaactccggctctctggccgctgccatgggtgcggggaactggcacgcccgccgcgcagacgaggtcgccccgcacggagggcggctccccttggatgcaccgagcctcacccgacagtggcgtcagcggcccgcgctccggcctagctctggggaccacgccgcgtgccctcgcgaggactctggcccagtccctccttggtggagagcctgacaccgctgctctgggacttcccggctgcgccctcccccagcgccaggaaagcaagctgcgtaaaggctgcggcagtctcggtctcccggagctcttgggagcctggccccgcccctttcccggtgattgatgtgtgctgcctctttctgggtgatttacatgtaatgccccgcccctttcgggatgattacgtgtgcctcgacctttaggtgatttacatgtagtgccccgccccgttcccggtgatttacatgtggtgccccgcccctttcctggtgatttacgagtgccccaccccttttaggtgatttttttttttttttatgtgtgcctctccccttcccaagtgatttacatatgttccccgctcctttcagggtaatttacatgtaatgccccgcccctttccgggtgatttacgagtgcctctccccttctcaagtgatttacatgtgtcccgccccgttccgggtgatttacatgcgtgccctggccctttcccagtgatacttttgtgctgcctctttccgggtgatttacgtgtgtgcctctccccaagtgatttacatgtgtgccctgtccgttttaaggtgatttacatgtggtgccccgcccctttccgggtgatttacctgtgtcccatccctttcccggtgatttacatgtggtgccccgcccctttcccggtgatacctgtgtgccccgcccatgaggggacgtctttaaagaacctggacccgccctcagtccaagtgatttacatttgcggccccgcccctctgggaaacttacgagaacctggcccctcagtccaaatcatttgcatgttcggccccatccctcgggggccttaaagaaccaagatgcctgcggacccttcccccacggagaccaggcccctactgctctaaaagtgttctcagacacttccctctgcagccgctcccagagtaaacggcggctccgccgggtcggagtccacctgaggcgttcagggccagaaagactcctggggctgcagcactctgcagccccgcctcggctggccccgcggtggctgagtctggcccggccccaggaccacgtccggccggcggtggcgcacagtatttgacgaatgggactgcgggagccgccgcctctgcaaggggcaccgcctggccacgccctcgggctctcttaaaggagccgcacccccaccccagggcaatcatcggacccggaccaggcctccgggtgacacatccggctctcagaggcgccaggaccctatcattcatccctttccacgtgcaaagtgaaaagtcagagcccgggcacacaccttggccgtttatgtatacagaagtggggtgccgggcgggaagggcgcggggaatgagggaacctagaggccgatgacgtcgttcagctcgaggtccgcgttggggcggcagcgggcctgggggggctgcgtcccggggcggggttccgcgtcgggcttggcggcagccgcctccgggcgcgccgcgtccatgacgcccagcaccgcgtccagcatggagggccccagatccaggtggaaggacagcagcgggtcggcaggcgagggcgctgcggactgcgggacggcgggcggcggcggggagcgcggggcccccgcggggggcgcccggggctcggggggcggcccgccgccgtggcggctcaggaacgaggtgtccccgaaggcgtcgccgccgcgccccacgtgcagcgtgtgccggaagtcgccgagcggcgcggagatggacagggcgccgcgatcaggccgcttcttgggctgcgcggggcccagctgcttcagcacgggcatctgcgaggggcacgggagggtcagcgcggccccagcccggggctcgcagccacgcgactgctcaaaggacgatgggggacggttcccgttttttgttttttgatttttgtttttgagacggagtctcgcccatgctggagttcaatggcgccatcccggctcaccgcaacctccgcctcccgggttcaggcgattcttcctcctcagtctcccgagtagctgggattacaggcacccgccaccatacccagccaatttttgtatttttgtagagacggggtttcacaatgttggccaggctggtcttgaactcctgacctcaggtgatcaacccgcctcagtctcccaaaatgctgggataacaggcgtgagccaccgcgcccggcctcccgtttcacagatggggtaagatgagactccaggaggtcccatgggcacagctgctgagctcacatttggatctaacctgactccagaatgcctatgaacaccatgctatgccgatcctcctgagagcgaatacttgagccttcctagaggtcaagtaacaaatatttcacaaacccttcagagtgcttcccagacttgactgatagaaaactccagcttgttggcccgggtgcggtggctcactcctgtaatcccagcaccttgggaggccgaggcgggcggatcgcttgaggccaggagttcgagaccagcctgagcaacatggtgaaaccccatctctataaaaaatgcaaaaattagcggggcatggtggcgcatgcctgtaatcccagctaaagtaggagaatcgcttgaaccccggaggcggaggttgcagggagccgagatcgtgtcactgtattggccactgcactccagcctgggcaacaggagtgaaaccctgtctcaataaaaagaaaaagaaaactccagcttgtcaaaaatggaaattcccaggctcctgttctgaagacagggctgactctgtccattaagcaaagcagatcctgcctagagcccaccacgcacacgaggaagaggcccaggtgggctttgcctagggtgcattttatgatttgaattacagtccttggtatctgtgggttccgcatcagcagattcaatcaactgctgataaaaaatactggggaaaaaatacagtaataaaaaatgagtacaagtttcaaacaatataacaattatttgcaaagcatttacattgtattatgcattataagtaatctagagatgatttaaagtgtaggagaggatgtacataggttatatgcaaatactagggcatttatataagagacttaaacatctgcatatttgggtatccataggggtcccagaaccagtcccatcactgctaccaaggggcaactgtacctgatcttttttttttttttttgagacgctaatttttgtatttttagtagagacagggtttcaccatgttggtcaggctggtcttgaactcctgacctcgtgatctgcccgcctcggcctcccgaagtgctgggattacaggcatgagccaccacgcctggccaactgtacctgatcttgagactacaacctaacaatatgatgtcttatgttttctaaaataataatataaattccctagccaggcatggtggctcacacctgtaatcccagcacttttggaggctgaagcgggtggatcacctgaggtcaggactttgagaccagcctgaccaacatggtgaaactccatctctactaaaaaaaaaatacaaaattagctggttgtggtggtgcatgcctgtaatcccagctacttgagaggctgaggcaggagaatcgcttgaacttgggaggcagaggttgtggtgagctgagatcgcgccattgcattccagcctgggtgacagagtatgactctgtctcaaaaaaaaaataaaaagccctatgttaaaaaaaatgggaagaattgcataaatttgaagctggcagcatctgcattgtaaactaggtgctttattgcccatagctgcaccaaattcttttttttttttttttgagacggagtcttgttctgttgcccaggctggggttcaagcgattctcctgcctcagcctcctgagtggctggaattacaggtgtgcgctgccatgccctgcaaatttttgtatttttagtagagatgaggtttcactatgttggccaggctggactcaaactcatgacttcaggtgatccgcctgccttggcctcccaaagtgttgggaatacaggcatgagccaccacgcccggcctaaattcaatatgaaatagaaacgcagccacagagtctgcccatatcctggtcattgcatgttttgtgtggaacttctgggagggactttgatgaccttgtacttttgttttaacagtcactgttatcgcaataataaaaacctatttcagttgaagccctaccctttgccagctgtatgaactgcaataaattactttatttccctgtttacttttctatctgtaagataaataaaataacactaccttcctttcaggatacatagaaaagtctgatcaaagaaaactatacttgtaatagtgctaaccaatgggtaatgctagcgttggggggaaaatatttccctaacaataattgtggaacaaaaattaggttggatagaacactatgagaaagacaaagccgctgacattgttttcaccgtaacaggcaccctgggaagtattggtgataatatggaggaaaatgaaagccaaagggatttaaaataattgtagatggctagattctgaagactggcctacacacacacacacacacacacacacacacactctttacattgatttccatggggaaaccagttttgatttactacctctgcagcatttatcaaatttctctgacctcaacctagatgaataaatatatttttatcgttacctagcacacaatctccactctctccttccccataatggaaataaaaattttaagaaacaagatttgtcttgttttgagacagggtctcactctgtcacccagctggagtgcggtggtgagatcttggctcactgcaacctccgcctcccggactcaagcgatcctcccacctcagactcctgagtagctgggactacaggctcatgctaccatgtagtgttatttttgtatttttttttttttttgtagagatggggtttcaccatgttgcccaggctggtctcaaactcctgagctcaagcaatctgcccgccttggcctcccaaagtgctgagattacaggtgtgtgccagtaagcccggccaatacttacttgtcttacaacgtggtagatactctgattccttccttccttccttccttccttccttccttctttctttcttttcttccctccctccctccttccttccttcctttcttttctttctttctccttccttccttctttctttcttttcttttttgatggagtcttgctctgtcacccaggcaagagtgcaatggcgcgatctcggctcactgcaacctccgcctcccaggttcaagtgattctcctgcctcagcctcccgagtagctgggattataggtgcacaccaccatgcttggctaatttttgtattttatagtagagatggggttt[132 bp omitted]tttatttttaaatgttgagctcagctcattaatgtatcttctggatccacagtttaaaaaaaaaatcctctctagctgctaacagagcctatgatctcagcacttgctctgctgtgggtcagaggtgaaaaagtggaattcagaaagtccattgcacaggtttgaatctggctgtgctgatcgctctgtggctttgagcaacttacttgacctttctgacctcatttccttatcttgaaaatggcatgatattaatctaatacttcccagtccttttgcaagaattggtggagggatatgtccctgcaagtcttggcacagtgcccagcgcacagggaatgttcaattaacatatgctcaatggagtcacacctcggatcattctcccagtgttccagagaaggaaatgggtgatccgagacaggacgtgactgaccaagatcacaaagccagctctagggaactccagtgtctagagctggctgcctccactctctgctgcctcttgactcgtggacagctctcagcccctgcctctggtcagacccagctcccagcatgcacctcgcatcccccttccattgccctatccgttgccaccacttttcagcacctggcaacacacataaagtcttggtttctgacatcacacacatctgggctcaaattttgccatttccttcttgtgcgatcccaaactggcttcctcaacctaaagctcagtttactcctcaaaaaacaggggttggaactcttgtttgtggctgggcgccgtggctcacacctacaatgccagctctttgggaggctgagacagcaggatcacttgagcccaggagtttgagaccagaatgcgcaacaaagtgagatgatctctctacaaaaataaaaataaaaaattagccaggtgctgtgtcatgcacctgcagttccagctacctgggaggctgaaaagggaagatcccttgagcccaggagtttgaggctgcagtgaggtatgatcgtcccaccgcacttcagcctgggcaacagaaagagaccctgtctcaagaagaaaagaaaagaaaaggagagagagagagaaaaagagagagaaggaaaggagggaggagagggagggaaaaaaggaaggaaggaaggaaagagaaagaaagagaaagaaaaagaaaggaaaggaaggagaaagaaagaaaggaaagaaggaaggaaggaaggaaaaagaaagaaaaaaagaaggaaagaaagaaagggaagaaagaaagactacactgagggtgccgaaattttattttccaagtgcttatcctgggccaggcaccagcctgagtgcctccccatgaatgaactaatttatttaatcttcaggacaactccattttacagatgcgcgatggctgagacacagagaagttaagtcacttgccctgggtcacacagtagcaaatgctgcgcgccagatctggaatccagacgaactcttagctccccataggagactacgggcatgccaccccatgagaaaaaaaataataatgttctgatttgatatgaaggcgagagatttcctctgacacccttgattgtcttttttcctctccagtccagaccagaacaacgagttggaagtcgttttcgaatgccacctctgcgccctagctctgagaccctgggtaagtcgcttcacttctgccagcctgggtgtcctcttaaatagaagcctctgacctccctctggttgaattgtgtttaaagcaatgaggtcatgctcggaaaaagtccctcacgctgccagggctcgggacagaggggctgttgtttgtgaccaacgtggaacaggcagaaagcggggcgcgaccgtggagcccggggaggcccgggccgcgcgttctccccccgcctccgcccacccctctctttcctgctggggcagggccacggctccagctgcagggtggcgggcacagctggttcacctctgtcctctctcagtcccggccccgccaggacggaaataacaacccactctagatccggcccaactggttctcagacccgtgggagctgcggtgcagccgggtcgggggaccccagatggggagacccccggcccggcgagggcttcactgcgcgcttcctgcagccacgtggctgcggccgggaattcagcggcccttttccctcccgaccgggacccaggacccctgtccccaccgcgccttacctcgcggtcctcccagagcggggcgggcgcgcgctcacgactccagctctagcccggacccctggttccctggctccgagtccgcctccgtctcctaatccccggcccgcgccttccttcttcctccgggcgggttctcacctggtaaggaaagtgtcatgtggaacccggagggagattcaggagccaggcatccgggtccgtagagccacctcctccttcgccctcaggtcctaggcgtcctagatcttcgctttcttaatcccaccccagacccgaaagtcaggggcccccagccccttcttcctcagacccaggggtcaagaccccccagcccctcctccctcagacccaggagtccagacccccagcccctcctccctcagacccaggagtccagaccccagcccctcctccctcagacccaggagtccagaccccccagcccttcctccctcagacccaggagtccaggcccccagcccctcctccctcagacccaggagtccaggcccccagcccctcctccctcagacccaggagtccagacccccagcccctcctccctcagacccaggagtccaggcccccagcccctcctccctcagacccaggagtccagaccccccagcccctcctccctcagactcatgagtccagacccccagcccctcctccctcagacccaggagtccagacccccagcccctcctccctcagacccaggagtccaggcccccagcccctcctccctcagacccaggagtccagaccccccagcccctcctccctcagactcatgagtccagacccccagcccctcctccctcagacccaggagtccagacccccagcccctcctccctcagacccaggaatccaggccccatcccctcctccctcagacccaggagtcaagaccccccagcccctcctccctcagacccaggagtccagacctccagcccttcctcctccctcagacccaggagtcaagatccccccagcccctcctccctcagacccaggagtccaggcccccagcccctcctccctcagacccaggagtccagacccccagcccctcctccctcagacccaggagtccaggcccccatcccctcctccctcagacccaggagtccaggcccccagcccctcctccctcagacccaggaatccaggccccatcccctcctccctcagacccaggagtccagacccccagcccctcttccctcagactcaggggtccagacccccagccccttcttcctcagacccaggagtcaagaccccccagcccctcctccctcagaccaggagtccaggcccccagcccctcctccctcagacccaggagtcaagaccccccagcccctcctccctcagactcatgagtccagacccccagcccctcctccctcagacccaggagtccagacccccagcccctcctccctcagacccaggagtccaggccccacccctggcaagccctggcataaggcccctttacctgcaccgggagctaaagtgtcagcccctctcgggggccatggcaggagcccaggcagaagcggaatcaccgcccagtccccaggcagagagggttttggcacaggcccctcccaggctttcttatcccccaaaagtttgcctctaggagttaaaggactagaaagcagtggtggaaaagctgaggcccctctgggcggagtgtgggggcgggaggaggccaggactaagtgtgcagggggaactggcagagggggtggggctggacagggcgcgcccccagcctggcccctcccctgcacagcttggaatttcctgaaactggggaagtctggctgtttagaagagtaatttcttccagattgcagctgtatggagagagagagagggagagagagagagagaaagagagaagagaggcaggtcagacagtgaaagcagcaggaggatgaagagcatggagggtgtctgagaggggcagctctggctttgctgcggcgtcccctagatgaacctccctgcctggagccactccgtcatagaaagctcatatctcattctaagcaccagtgtctattgatgacaagagagtgaggtttgagtgttagggcaattccttcagggcggtgcgggcagggagagagagcggagggggagagcagagtcccaaggcaggatgcagctcagtgggaagaaggtgggaagcccaggtgggagtctaggtctgtgggagggaggtggaggcccaggtgggaggctgggtcagcgggagggaggtggagatgcaggttggagcctgggtcagggtcagagggagagggagagggaagcccaggtaggaggcagctcagtgagagaaaggggaggcccaggtgggaggctaggtcagtggttttacccctagctggggctggggttgtagtgctggagagaagacagtcaatttgcgataacaggaagcagccttgagctgggtcttaaggatgagtgagagttgatggagcccaggagaggaggatggatatcggagcagaatggggaagctgggtggggcagagggttctcagacaccaggtggagtttgatttgcctggagaagccagcttgaaagccactgggagcttcagtttgccctgcaggcgtggggggaccgcggaggaatggcagggaaagatccaggtgttagaaagttcccactggggtccccgcaggggatggagtgaagcaggtcaggactcagcacccacagcaaaatttaaggggggagggggcagtggtcaccagaaactcagtaatcagaaaaactatatatatatatatatatatgttacagacttttattaagtattttttattgatgtaaaattcacataacataaaattaaccatcttttttttttctttttttttaattgagacggagttttgttcttgttgcccaggctggagtgcaatggcgcgatctccactcactgcaacctccaccttccaggttcaagcgattctcctgcctcagcctgttgagtagccgggattaccggtgcctgccaccacgcccagctaattttgtatttttagtagagacggggtttctccacgttggtcaggctggtctcgaactcccgacctcaggttatccgcctgcctcggcttccaaagtgctgggattataggtgtgagccactgcatcgggccagaattaaccatcttaaggtgtacagttcagtgacatttagtacattcccaatggaacatacctaattggtacactggtaattgtgtagccatcctttctatcaagttcccaaacattttcatcacccctaaagaaaaccctattaagcggtcactcccatgccccgctctctgcagcccctggaaaccactcccctgttttctgattcatggattacctcttctggacattcgcataaatggaatcacacatcatacagccttacctatctgacttccttcacataagcaggttcatccgtgtgcagcatgtgccagtggttc[133 bp omitted]caacttggtgaaacgctgactctactaaaaaaatacaaaaatcagctgggcgcagtggtgtgtagtctcaggtactcgggaggctgaggcaggatactcgcttgaacgcaggaggcggaggttgcagtgagcccagatcgagccactgcactccagcctggacaacagagcaagactcgctctaaaaaaaaaaaaaaaaaaaaaaaagacgaaaaaaagaaaaagagatatgtatataagagatctatt[137 bp omitted]gtggcgggcgcctgtagtcccagctactcgggaggctgaggcaggagaatggcgtgaacccgggaggcggagcttgcagtgagccgagatcccgccactgcactccagcctgggcgatagagcgagacccaaaaaacaaacaaaccaaaacaacaacaacaacaactaaccatcacgccaggataatctccctgacgtaagatccacaattttaagtgcatctgcagacctattcacgggtcgcagggatttgtgcgtggacatcttgcatgtgcgggggtgggtggggctattctgctaccacagtgcccctcagaggtcaggtcctgggagggggcggggccaaagcagggccagcttcatgggttgcccagtgacccatgctcggagggccctgcacctttctttttttgtttgtttttgagacaaagccttactctgttgctcaggctggagtgtcaaaggcaagatcttggctcactgcaacctctgcctcccgggttccagcaattctcccgcctc[134 bp omitted]cggtctcccaaagtgctggaattaccggcgtgagccactgcacctggcctttttgtttgttttttagacagagtctctatctgttgctcaggctggagtgccaatggtgagatctcagctcactgaaacctccacctcccgggttcaagcgattctcctgcctcagcctcctgagttgctgcaattacaggcatgcgccaccacacctggctaatttttgtgtttttagtagagacggggtttcaccatattggccaggctggtctcgaactcctaacctcaggtgatcggccggccttggcctcccaaagtgctgggatcacaggaatgagacaccgcgcccggccaccacacttcttttaatgctcagttgtcaccaatttgaaattccttacgttttgaagaagggatcctgagttctcatttgcaatagaccccaccaattatgtggctggttctggatggaacagcgggaagggcagaggcctgggagaaagtggccgagaagagcaacgatggagagataaaagggaaaggaactctggatgataccctggcagcagcctgggaaagcaaagagggaggaagagagaggtgtgtcccagaagcctggagtgggagatgcaccgtcccttccttgtggactcaaaagcaggctaagtatgattaaaaaaaaaaaaaaaaagagggagtgaggtccactggactcagtaagaatccagagttcactgggggcctgggtgagagcagacccaaatggggtgggcagggagaggtcagattgcagtggagaaggccagagagagagagattggaggccaggaaaggcggaggggtcagcagataacccagggtgtcctctgtgaagggaaagagagataaggtatctggaagaacagggaaggtcaaagaaaggttttaggttttttggttcatctggatacattcccaactttttttttttttttttttttttctgagacagagtctcagtgtatcacccaggctggagtgcagtggcacaatctcagctcactgcaacctctgcctcccgggttcaagcaattctcctgcctcatccttctgagtagctgggactacaggtgtgtgccagcatgcccagctaactgtgtagagatagggtttcgccatgttgcccaggctggtcttgaactcctagactcaagcaatctacgcgtctcagcttctcaaagtcctgggattacagacctgagccactgtgcccagctggttcctgagactgcaccatgattccttagctgatttcagtgagtacatactgccagtgcccctacataattatacaccagttcctagaatctttttgtaattattcagacttttatagcaatctaatcatcactacccggcaatttgttttcttaagtctagtgctattgagggggttccaacgtttcccttttaaatgtttcagcccctcttctgagtagcagggacatggatggaactttgatcctatcttatccttaaagagcttacaggatattgagaggagaggagggaagttgacatggcaccacccagtggaatgacatagtcagcacagagctcagtgggagcacagaggaagagcgccaggcccatcatgtccagctgcgtaggttgtgcactgcacaactctggggtcatcatatcacaaactgagtgtgaagagccttgtgaggcttccaggacaggtttctaggggtcaccagatgctggtctagatcaggatggaggaatcttgactcctagaaagaggtgggcagggaattgctgaggacgtttgaagtctaatgggctgagccttccctgtggtgagtggcagctcagctttctagaggaagtttgggaagaagaatcctcagtgaaggggtgttctacttggagtgattcgtgtttccttccagctcactcagggtagtcatggcctcttccctttccctggctctcagtctgcatccaccacactgttccccctgctgaactttgcacactccagaccactggaccactgctgcactttctcatttatccagatcattttcaccttctagtaagctgtgaatgtgcttattatgcccaagggttactgtctgtctccttctgcaagaatataggctcctcggctgggcgttctgggtcaggcctgtcatccccagcactttgggaagccgaggtgggcagatcacgaggtcaggagatggagacaatcctggctaatgcgatgaaaccccatctctactaaaaatacaaaaaattagcggggcgtggtgatgcatgcctgtaatcccagctactcgggaggctgaggcaggagaatcgcttgaacccaggaggcggaggttgcagtgagccgagatcgcgccactgcactccagcctgggagacgagcgagactccatctcaaaaaaaaaaaaaaaagaatataagctcctcgatggcaaggatgttttgcatattgatggaccgctagagcctcaaacagtgtctggcacacaggacaggaccaacaaatactgaatgagaaaagtgaatgacagatggaaaagaacagaactaaacagggagtttctccactgggaccacaagagggcactcaagatacgtgtcaaacccttgaagccccaaggtgggtggtctctctgctcctcagcctggaggaccagggacaggtgacctggaccacgtcctttctcctctgtgagcctctatttccccatgtgtagcgtggagatggaaatgcctgaaatacgttcttgtgagaagcaaaaacccaacaacgcatgcacgtgaatgtcttccaaggggttgcacgtgtccaaattcatctaattgtgtacattaagtgagagggttttttagtagaacaattatagctaaacaaagctgctaaaatgtaaataaaataaaaaataaaacttgcattgaacaacaacagagccgttaggctagagcaagaaatctgaaggatggcaatccagaccccaataaatccacaaaggggtgtgtgtgtgtgtgtgtgtgtgtgtgtgtgtgtatgtatttttttttttttttgagacggagtttcactcttgttgcccaggctggagtgcgatggcgcgatctcggataacctcaacctctgcctactggattcaagcaattctcctacctcaggcttccgagtagctgggattacaggcatgtgccatcacgcctggctaatagaaatattaattacatgaagcaaccagtgagcacaatgctatcctgtgaaattattaaaacctaaaactaaatggaagctctggttgaaaagtgcaatacattcctagcaggatgggagacattcagcaaaatcaatcatgtgtctgtatactaatgaacaataatttaaaaacgaagtgaggagaggaattttatttacaaagcctccaaagtaataaaatgagtgggaagaaatttaataaaagaaataaaggacgtgtatactaaaaattacaaaagatgctgagaagttaaagatctaaataaacggagaggctgagcgtggtggctcacgcctgtaatctcagcattttgggaggccaaggcaggcaggttacttgagatcaggagttggagaccagcctggcctacatggggaaactggtctccactaaaaaacaaacaaacaaaaattagccaggcatggtggtgcacacctgtaatcccagctactcaggaggctgaggcaggagaatcgcttgaacctgggaggcacaggttgcagtgagccgagatcgtgccactgcactccagcctggatggcagagccagactccatctcaaaataaataaatacatacgaaaatggagaaacagttcatacattcacaatagcatccaaaataataaatataagaaataaaaattaacaaaaagtgtcatcttgcaaagcagtaacataatatgaaaaaaccccactgaccacatccttcctcattcttagaaagggaattatggtcatagtggttgacctgtggccatgtaattctgtccaaatatccctgaatggtaaatgtgaaaacagtagaatgaattccattgaaaataagaaaacaagaagaaataaagtcagaacgcaaaagttttttttaagggttattgggatggaattttgtttgtttgtttttttgagatgcagacttactctgtcatccaggctggagtgcaatggtgcgatctcagctcactgcattctccaccttccgggttgaagccattctcctgcctcagcctcctgattagctgagattataggcatgtgccaccacgcccggctaatttttgtatttttagtagacggggtttcaccatattggccaggctggtctcaaactcctaacctcaggtgatcggccggccttggcctcccaaagtgctgggatcacaggaatgagccactgtgcctggccaccacgcttctgttaacgctcagctgtcaccaatttgaaattccttacgttttgaagaagggacgtcgagttctcatttgcaatagaccccaccaattatgtggctggttctggatggaacagcgggaagggcagaggcctgggagaaagcggccaagaacagcaacgatggagagataaaagggaaaggaactctggatgataccctggcagcagcctgggaaagccaagagggaggaagagagaggtgtgtcccagaagcctggagtgggagatgcatcgtccctttcttgtggtctcaaaagca[136 bp omitted]ctcatctctactaaaaatacaataattagctgggcgtagtggcgcgcgccaagatggagcttactcgggcggctgaggca[137 bp omitted]atattgatggaccgcgagagcacaggagaggaccaacaaatactgaatgagaagaatgaatggcagatggaaaagaacagaactaaacagggagtttctccactgagaccacaagagggcacccgagatacgcgtcaaaccctcgcagccccaaggtgggtggtctctgctcctcagcctggaggaccagggacaggtgtgaccgggaccacgtcctttctcctctgtgagcctctatttccccatgtgtagcgtggagatggaagtgcctgaaatacgttcttgtgagaagcaaaaagctaacaacacatgcacgtgaatgtcttctaaggggttattgcatacgtccaaattcatctaattgtgtatattaagtgagagggttttttagtggaacaattgtagctaaataaagctgctaaaaagtaaataaaataaaaaatgaaacttgcaatgaacaacagcaacagagtcattacgctagagcaagaaatctgaaggatggcaatctagaccccaataaatccacgaagttagaattttttttttttttttttttttttggtgacggaatttcgctcttgttgcccaggctggcttacaatggtgcaatctcggctcaccgcaactgccgcgtcccgggttcaagcatttctcccatctcagctttctgagtagctgggattacaggcatgtgccatcgctcccggctaacagaaatattaattacatgaaacgaccagtg[225 bp omitted]gaggcaggagaatggcgtgaacccgggaggcggagcttgcagtgagccgagattgcaccactgcactccagcctgggagacagagcgagactccgtctcaaaaaaaacaaaaacaaaacccataaaactaaatgaggctctggagttgaaaagtaccacacattcctagcaggataggagatatattcaccaaaatcaatcatgtgtctgtatacgaacgaacaataatttaaaaatgaaatgaggagagcaatttcatttacaaagcctccaaaataataaaatgaatgggaagaaatgtaataaaagaagtgaaagacgtggatactaaaaattacaaaagatgctgaggagaaattaaagatgtaaataaatggagaggccgagtgcggtggctcatgcctgtaatctcagcactttgggaggctaaggcaggtggattacctgaggtcaggagttctagactagcctggcaaacatggggaaacctgatctatacaaaacaaaacaaaacaaaacaaaacaaaaaacttagctccagcttagagccagactccatcccaaaattaatagataaatacatacatgcatgcatacatgaatggagaaagtttatacattcacaatagcatctgacataataaatgtaagaaataaaatgaataaaaagtgtcatcttgcaaagcagtaaaataagatgaaaaaacctcactgaccacatccttcctcattctcagaaagggaatcacggtcatagtggttgacctgtggccgtgtaattctgtccaaatatccatgaatggtaaatgtgaaaacagtagaatgaattccattgaaaataagaaaacaagaagaaataaagtcagaactcaaaagtgtttttgaagtgttattgggatggggttttttgttttttttttttttttttttttagacggagactcgctgtgtcgccgaggctggagtgcatggtgcgatctcggctcactgaaacctctgcctcctgggttcaagcgattctcctgcttc[131 bp omitted]acctcagcttcccaaaatactggccttacaggcacgagccactgcgcccagcctatttgttattatttgataatatttatattatcacctatcaatttatgatgacaagtgcacttaacataagatctatcttagcaaatttgtaagggtacaaggcagtcttattccctgcacacactaagccgcacaggagactctaggccttcctcatcttgcatgactgaaactcaagagggaaaaatgaggagttatcagtcataggaaagagatcttgataccttgcctgttctttctaagccaatactctcagctccttaaagggggcacttttatttcattttattttttttccctcaggtataaataatttaatttttttcagttataaggctaacacatactcaatttaaaaatccaaataaaaactcctcaaaaaatgaagagccatttaaactcccttgacctaatattaactgctacaaacatcgtgattaatattttcctacaaatctctccttccataaacatgtgtataaacatgcatatgtaatttaacttacatgtggcctctatatacgtgttttttttcctgttttgctcactcaacaaaatcctcggtatcttccatgtcaatgaaagttaaacagcaccatcatttttaatgaccacacagtattccattgcactgggcaggtggggggcagggcattgtttatttaatatttaagtgtccattaagtgatgggcaatatgtttctaattcactgctcttcattctacaagtgtttgctgagcatctattatgtgccaggccctaagtaccagtgataaagtgatgatcaagacagaagagccaagacttccctggccaagtgaagtctccattctaacggcgggagagggacagcgtacaagtcaatgagtggataattagaaaggaggatgaacgtcaagaggaaatgaagacgaatcttcttagcgaaggaatgggtgtcgggctagtggacttctttcaacacagtggtctaggaaggctcttcttgctgagatgatgctgagcagagacctggaggctgtggtgcaaagcaggaggtcggtgcacccaggcagagacgcggagccccgaggcagggagggacctggtgtcttcaaggaacagcaggaatgtcatgtggcctgagggcagggagtgaggggcacagggaccaacgtgaaattggaaagatgagtaagtgtcccgtaggtcacagagtttgggttttgggccatgtgtactatgaagtcactggagatttcaatggtaacaaaacataatctgatttatgcttttaaaggatcactctggggccgggtgcaggggctcaagcctgtaatcccagcactttgggagac[132 bp omitted]ggctgaggcaggagaatcgcttgaacccgggaggtggagggtgcagtgagccaagatcacgccactgcactgcagcctgggcgacagagtgagactccgtctcaaaaaaaaaaaaaaaaaaaaaagaaagattattctggctacaatatggggaggggcagctgagtagcacgaaatgagcgtggagagaccagctaggggatgttccctggacgaggggagagagggtgaacctggcgccgtggtgctggcaagcagtgtctgcatgaggacagattctgaaggtagaacaaggggagagggtgagaaagaggagcagttgaggcgatttctaggactgcagcttgtccaggtggtggacggggaagaaaacgtgggagagccacaattttaactttctcatattaatccttccagtgtttgtttctgggtgaatatgagacaatatgaatgtatattctgattcccccaattcttggcacaatacagatttaatccctaagaatacactctgggatctctccataaagtacataggcgattttctttttattttctttttttgagacaagtctcactctgttgcccatgctggagtgcagtggtgcgatctcagctcactgcaatctccacctcccaggttgaagcaattctcctactcagcctcccgagctgaaatgatgggcgccagccaccaggtccagctaatttttttgtatttttagtagaaacagggttttaccatgttggccaggctggtctcgaactcctggcctcaggtgatctgcccgcatctgccttccaaagtgctgggattacagtcaggagcctggcccatggggcattttcaaatatatttctccctggtcttctaaattccagactgactgatgagaagtctgatgtaattatgataatagaaacttagtacaccattgtgttttttctcccacctttgaggtcttctttattttctttttcctttgagataatgcagcttggtgagtgcggtgagcccttagggaggcattttttctctctccctagcgtcactgctggctggcttcctcctctctgccctttacttcttttttttcattccagctcctcaagttgcatgttcagtgattaattctccaaacttcataatttcttttttttttttttgagatggagtctctgtcacccaggctggagtacggtggcgcgatcttggttcactgcaacctccacctcccgggttcaagcgattctcctgcctcggtctcccaagtagctgggactacaggcgcccgccaccacgcccggctaatttttttagtagagacggggtttggggtttcaccgtgttag[131 bp omitted]aaaaaagtgtgcttaaaacaatccacatttcactttaagtgtgatttttattgcatctaagtttcgatatgaataacattgttcatttctaaatatgtcacaacttctgtgtttttttttttaacagtcactcaaaagttatgcagatttttgttgttgttttaaaaatgtgtgttttttaaacgtttaatttttggtcttttatgtaatttttgcagtcacgaaatatggtttcattatattaaatctttggaatattttgagaccttcttggtggattaagaagtggtcaatttttgtagatttttcatatgttcctgaaaagaatgtgggttctccattgttgctgttttgtacatataaatataacaacacaccaataatgaaaataacaattatgataacaatcattaataatcaatattaggccaggcgcggtggctcacacctgtaatcccagtactttgggaggccgaggcgggcggatcacctgaggtcaggagttcgagaccagcctggccagcatggtgaatccacgtctctactaaaaatacaaaaatagctgggcgtggtggcagaggcctagaagcccagctactcaggaggctgaggcaggagaatcacttgaacctgggaggcagaggttgcagtgagccaagattgtgccactgcactccagcctgggtgacaagagtgaaactccatgtcaaaaaataaataagtaaataataataatcaatattagaacccttagtaatgtcaggctcagtctgactactttttttttatttattattatactttaagttttagggtacatgtgcacattgtgcaggttagttacatatgtatacatgtgccatgctggtgcactgcacccactaactcgtcatctagcattaggactactttttatttttaagaaagcatgcttacttttgcctttcatttttctatatttttaaaaaactttgtaaacatttatggggtacaagtgtaattttgttgcatgtaaagattgcccagtgatgaaatcgggacttccaggttatccattccccaaataatgtgcattgtacccattaagtcattttcttttcttttctttctttctttttttttttttttttgagacagagtcttgctctgtcgtccagggtggagtacaatggtgcaatcttggctcactgcaacctccatctcccgtgttcaagcaattctcctgcctcagcctcctgagtagctgggattgcaggtgtacaccaccacacctggctaattttttgtatttttagtagagacagggtttctccacgttggccaggctggtctcgaactcctgacctcaggtgatctgcccgcctcggcctcccaaaatgctgggattacaagcgtaagccaccacacccggcccccgttcctcattcttagaaagggaatcatggtcattgtggttgacctgtggccgtgtaattctgtccaaatatccctgaatggtaaatgtgaaaacagtagaatgaattccattgaaaataagaagaaataaagtcagaactcaaaagtgtttttgaagtgttattgggatggaacttttttttttttttttttttttttttttttttttttgagacggagactgctctgtcatttaggctggagtgcaatggtgcaatcttggctcactgcaacttctgcctcctgggttcaagcgattctcctgcttc[134 bp omitted]cggcctccaaaaatgctggcattacaggcacgagccactgcgcccagcctatttgttattatttgataatattgatattatcacctatcaatttatgatgacaagtgcacataacataagatctatcttagcaaatttgtaagggtacaaggcagtcttgttccctgcacacactaagccgcacaggagactgtaggccttcctcatcttgcatgactgaaactcaagagggaaaaatgaggaggtaacagtcataggaaagagatcttgataccttgcctgttctttctaagccaataccctcagctccttaaagggggcacttttatttcattttattttttccctcaggtataaataatttaatttttttcagttataaggctaacacatactcaatttaaaaatccaaataaaaacacctcaaaaaatgaagagccatttaaactcccttgacctaatattaattgctacaaacatcttgattaatattttcctacaaatctcttattactaaattactcgatagccagttattaagtaatttcagtctgagtaccattaacataattactcactgaataatcacaacagttccatgagttaggcaccattgcttttttattttacagaggaagaggcaaagaaatagagaggtaaataaacttagtttaaagtgagagagcttataactggcacgaccaaaattaaaatctagagatctggcctctggaattgtactagataaatcaagttatgcactcataactttccccatactccctatatactatgtctattcattcatcattcattcaaaaatatttattatgtactatgtgctagggagtgttccaggagcagggacactacaggaaacactgcaggaaaaaaatctatggtttcatggggatacattgtagtgggaaggcagatagtctacaatattaataagtaaaatacgtgcacatatgctgaagattaatgatatatgctgaagaaagaaaaaaggcagcgagaggtgatacgaaatctggagggagtgttgcaacttcagacaggatggtccaagaaggtctgaaggataaggagatactggggttgacagtgaaggagagggagggatgagccttgtgcctgtctgggtgaagagcattccagtcgagaatggcatgtggatgagccctgaggcagatgcttgcttgatgtttttttaggaatagcaaggagatcactgggactgcatcacagtcagtgaaaggcagagtcggaggagatgctatcaaagtactaacccaagttgggagacagaagacgcagtcgtgtcaatatgactgaggcgggaagtcctggaaagtttctgatcagaagagtggcacagagtggcgaatgtttttattgtattgtgttgttattttactacccaattgcattttattatcagcgtaccttattttatgaaattagacctgcattttggagggagagtctgattttcatgaaggcatgtggtatgcttctgacgataacgccagcattccaggtaagctgccgtcggccctacctccgggacagcttgatgcaagatgctaatcaaattaactccctgagcgtcactgttctcatctgtaaaactggcctaatgatgaaaacatcttcccaaagttgtgagaattaaaggaactacccataagggatactcggagcagtgtctggcatagagcgagagctcagaaaggttatctcttcctttgattgccttgtgcaattctgacttcaggaaggtcttaccgatatgttttagacaaaaatatgatgatgccacgcttaggctcaaaacctgtcccactctcgtgagggtaaaataccaaaactctacttggccttttagagactcctgctcaatcaatgcacatattcttcttcattatttttccatctggagtccactcgacttacaacaggcaaattatctcctgatggggactttcacagaagctgtctcctctgtccacgtctccccccagctgctcttcctgtcgccagctcgtcagtcctcagcccggattccactccacactgcaggtggcttccctggggtcagctctgaggttctctttcttttcttttctttttgtttccctccttccttccttctttccttccttccttcctttctttctctctctctccctcccttcctttccttctttctctctttctcttccttccttccttcctttctttctctctctctccctcccttcctttgcttctttctctctttctctttccttccttccttcctttctttctctctctctccctcccttcctttgcttctttctctttctctttcttccttccttccttgcttccttccttcctttctccctcccttccttcctttctttcctttcttttttctctctctccctcccttcctttgcttctttctctctctctttctctttcttccttccttcctttctctcttccttccttccttcccccgctcccttctctttctttctttctctctctctcttctctttctcccttcctttcctttctttccttctctctttctctctctctccctttccttccttcctcccttcctccctttctctctctcttccttctctttctttctttctttctttctttctttctttctttctttctctctcctctttctctctctttctctttctttctttctttctttctctctctttctctctttctctctctttctctctttctttctttttctttctttctttcttgacagagtctcgctctgtcacccaggatggagtgcagtggtgccatctcggctcactgcaacctccgtcttctgggttcaaatgattctcctgcctcagcctcctgagtagctggggttacaggcgcttgccaccacgcctggctaatttttgtatttttagtaga[143 bp omitted]atttttttttttcctctggagcacttactacatcagcagatatggctctcagtgcaacaaaactcacagctctcttacgtggtgtagagttgtccctggaggcagctgccccatgagggaccctatcttcatccttcttgtacccagctgtggactcctgactaattcccacccttggaatgtgagcagcagtgataagcgacattcagattttttatttaaaaggcacggatgagccctttccattctctcttcctctttcccctcactggtgacagagcactccagggttctaggggaggttggatcccaaaggtggaagaatctgggcacctgagtcacctgatggaggagctccaactgccaaccgggggcccctatatggacgtgtaacacgagtgagtagtgaccattccattgtgacaaactgcagatatttcgaggctaatttgttaaaatctaccgttaatgtgctttatatgacttttttttttttttaagatggagttttgcttttgtcgcccaggctggagtgcaatggtgcaatctcggctcaccacaacctctgcctcccggttcaagcgattctcctgcctcagccttttgagtagctgggattgtaggcatgcaccaccaggcctggctactttttttgtatttttagtagagatggggtttcaccatgttggtgaggctggtcttgaactcctgacctcaagtgatcctcctgcctcagcctcccaaagtgctgggattacaggtgtgagccactgtgcccggcctatatgacatttgaatagtcagaggtgtgccctccacattagactgtgaggtccgttgacttgcgtggctcgtctctgacacagactcaagcccttaatagccgcctggaaatgtacgttttggttcacacaaaaaggaagttgaccaagcccccttgatgaagcctcactggggaggtggcccatcgaaggtcgtatattgtgaatggggcgaaggcagcgtcgccgtctccttcaagtctgacctccaggttggtgttcagattccccctccacaccccacagccgtggttgcccgtctggatttggtgtttcggtcagagatgacgttcgggccagtcgtatggatgatgatgtccaaggagacagttctctcctttaccccagtcacgggaaggaagagctaagcctcatggtgccttcctgggagatacgtggtaagaagccacaagacggtcgggactgagtctctgcgcaccgcatcccgagcctctgccatctgcacagcgaggcgggcgcaggcagcacggtgccccttaccatgctttcttcctggactttcccttgaccagtcttggcatggcaggcgagggaatgagggattggggctgggaggcggggaagacagctctctccctgggcccatgtctggttagatcaatgctgtgggagcttagcgactgaagagggagcagagatgatggcaggaaggcattatctgcccaagcctcaggcttcgcagtccaggttgggaccaagagcttgcagacgtcatcgagtgcagattttgagcgaagtactgagcattgtaaatccagatttctcttccagagctgagtctgggccacaggacctggacacaggagggtcagtctctccggtaatggtgagggtctgtcttcttggagcagcacagcggactcccaccaggacagtggatgctggataccgaagggctgggctcaggacagtggatgctgggtacggaagggctgggatgaggacagtggatgctgggtaccaaagggctgggctcaggacagtggatgctgggtactgaagggctgggctcaggacagtggatgctgggtatggaagggctgggctcaggacagtggatgctgggtaccgaagggctgggctgagggggtcactttggcagtggttctggagtctgaatttctaagggcctggaactcatgagactctagatgctgattcttttctggagaacttctccagagtcaccatcctggcttgtgcagactcaacattccacctgaagagctctgggaacctctggggctgggagccttctgggcctgatgagttctgttgggatggagaagatgatcttgaagttaaagatttcagtgggagtccaggaaaacgtcgcagctgtccatcatacccacaacagcaaacgactcaggactttgtcacggccaccgcggcagccaaaaccacagctgtgatctggggctggactcatacccagaggttgtctgggttcaggttctgcaaccccggttcagagaaagaggaaacggagtgggccgtgtggaccccgtccttcatcgaactccagaactaagagaactgggaggggagaaggccgtcacccttgcatggagctgcctccctcagttctagtggtttctacaactccatgcaggttagctaaggtgtgcatgggttccagaaggaacatggagatgtttctctttgatgttacttgaaactttcgtttggcaagttccttctaagatcaggagattcaatcaccccacatggtccatcagtcagggtatcacaacgtcgtgctccttggctatacagtctcaggtacatttcttcttgagattatttttcacgtgaggcagagatgtgtggctgctcaccagaaaaaaagaattctctacttcctcttacagtgcaagcatttgaatctctgggaggtggctaccctcaccaagggacttttttcctagtctcctttgcatccatgtgtgactgaccataatgactacttatagccaaaaatctggacagaaatgatgtgcgtcaatcaattttgcaagtttacaaatattttctgtgtctcctctttctgtttgaagtatgggacgccattgcccaaggggatgatgtgagcacaatggaagaagcggatgtccctgagtcatcctggggagaaaattcaaattctgcccagagaaaccctcattggtcatttacatgagtgagatgccaaacctcactgtgttaagccatcggtattttttcttttttgagatggagtctcgcactgtcgcccaggctggagtgcagtggcgagatctcggctcactgcaagctctgcctccgaggttcaagcgattctcctgcctcagcctcctgagtagctgggactacaggcacccactatcacgcctggctaattttttgcatttttagtagagatggggtt[137 bp omitted]gtcaccctaactcttacctcacaatagtagctaaacaatttgtgatttgctctttgatcctgtccctatcatcattagactcaagctctgttgagggcaggggctgcatctgttttgttcactcctgaatctcaaacaccaagcagataataagcaattgataaatattggttgatcggcttctgaagaaagaaaattcacacatttatatttagaaaaatttataagggaagtagccgagtggggtggcacacgcctgtcatcccagcattttgggaggttgaggtgggtggatcacctgaggtcaggaattcaagactagcgtggctgacgtggggaaaccccgtctctactaaaaatagaaaaattagctggtcgtggtggcatgtgcctgtaatcccagctactcaggaggctgaggcagaagaatcgcttgaacctgggaggcagaggttgcagtgagctgagatggtgccattgcactctagcctgggtgacaagagcgagactctgtctcaaaaaaaaagaagagagaagtttataggtgaagtggcttgtccgaggtctctgaggctgtgggacaggaagtcacaggagaagctcattctggctgacttcccagctggtgttctgcacctctatcagtatcttaggaaccaagttaccacgacacacctattagagtggccaaattctaaaacatggacaataccacatactggcatactggtgaggatgtggagcaacaggaactctcattgctggtgggattgccaaatggtacagtcactttgggagacagtgcggcaatttcttctaaaactaaatgtagctttgccatgtaatccagcaattgcattccttggtatttacccaaggaagtttgaaatgtatgttcacataaagtctgcatatgaatctttacagtagctttattcataatcgcccaaacttggaagcaaccaagatgcccttcagtaagtgagtggattaactatgtgtcgagacaatggaatattatcccatgctaagaagatacaagctctcaagtcatgaaaagacgtggaggagagttcaacgtatatcactacacgaaataagcctgcccaaatggcgtatccactgtctgattccaactatgtgacattctggaagatgcaaaactatagaaagagtgtaaagttcattggttgccagaataaaaggcttgggcaagaggaaatcatcccagtggaaatggagaaacgcaggaacaaatgaagagcaacagaagaagctaaatatttgggtaaagataggaattttgaatgatgatttcatcattaatgaattaaggaaacattgatgcatgctcattctgtatttgatgacattgcaaacagtgttttgaaaactatactttgcactaaaattaaaattgagcgcctgtaatcccagcactttgggaggccaaggcaggtgaatcacctgaggtcaggagttcgagaccagcctggtcaacatggcgaaaccccgtctctgctagaaatacaaaaattggctgggtgtggtggtgggtgcctgttatcccagctattcaggaggctgaagcaggagaatcacttgaactgtggaggcagaggttgcagtgagccgagatggtgccactgccctctagcctgggtgacagagtgagagtctgtctcaacaacagcaacaacaacaacaaaatgacagcatggctcaagtgtgttggctcacgcctgtaatcctagcactttgggaggacaaggtgggtgagcttgagctcaggagtttgagaccagcctgggcaacaagacaaaaccccatctctatcaaacaaaacaaaacaaaacaaaacaaaacaacaacttgcggagcgtggtggtgtgtgcttgtggtcccagctactcaggaggctgaggtgggaggatctctggaccccaggaagtggaggctgcagtgagctgagattgtgctaatgcactccagcctgggtgacggagcgagaccctgtctcaaataaatgaatgaatgaataaataaataaatcttaaagatgacagcctacatatatatacacacacatgccaaactgatacatcgatgagataacactgtatatacaaaagtgcaagggaaatttgttttttttgagacagagtctcactctgtcgcccagactggagtgcaatggcgcaatctcggctcactgcaacctccacctcctgggttcatgccattctcctgcctcagcctcccgagtagttgttactacaggcgcccgccaccacacccagctaattttctgtatttttagtagagatggggtttca[141 bp omitted]cggtacctgaggtaggagggggaaacaggctggagtatacactacagagatagtcatgcttcatcaagcctctgatttccctggagcatgttgacttcacgttgatttttttttttacatgttctgttaaaaaaatttctttaaattggcctttggaaatttaccagcagtgtgctggtaaagtcttgacaatcagctctctgaaaaaaaaagcaaaaagaaaaacaaaaaacaaccccgacgtgtagcatttgccgatttctctggtgtaaatactcacagcatggctttgacatgagttttacatttggtaaaagcaaattgtgcctactttgaatagaaggattgggacagagatatggttcttgtcaggcactaattagggagtaaggcttgtctaatattgccttggctctcaagcaaaataaaaaagtaacatttgggaatctgtgttgcttcctcagcccatcctgggtaaaatcggagacgtatacagggcagggagaagctgtttatttccatgcctgcggttggagcttcttaaggatttgagctgtgatgctggcacctggcagaccacatcctgtgcggttttcagttttgctctgttcctgaccctggtatagcagaagctttttcacatctatgacacccgctatgtcttggtaaaccctggaagggaaaggaggacaaggttaaaatactgttccgaggacctggtctctccacagcgcaggctggaggtggcagcccgtggaaagccaagttcatccaccatcggagcccaggccaggctgccaaggctaatattcaggacaaagccaggcacaggtcgggaatcctatgaagatgatcatcgtcctgaggtcttccttccagggttgcatccgggccagaagatggaaagagaaatgggtgagtccctgctaccaccccaccctcaggttgcttttttggctgaacaagaagggtcctcccaggcaggaagggtggggcacagaaacgtgagccaatgtggatgacttggggagggctttgcagttgaatctcctgaaaacagcaagaagtacagacctccgggcattctagactcagattctgtagacgcttccctttggccgagccaagccagggttgctcaggaactggggtccttgagattggattagattggacggaacgacacaggattgcaacgtgcagaactgtgaggaccggggtttagcttgagttccccagtctgtccacgaggtccaagcttgagatcattacggcgaccacatctcaggaggaagataggtcagcaatgcagtgatggtgctggaatagttttgaaatatttgaactattctaatgcaaactcttcttttaatgacatttcacgttgcatcttatgtcattttatttatgtagatgttgtctttccacttgacatttaattggtgtttaatttaagttgcaaatattgtgtatgtatctgagtctagtgtgagaatcattactctatgcctgtgcatcccacaccaagtaacttttttttctttttttttttttaagatggagtctcgctctgttgtccaggctggagtgcagtggcatgatctcggctcactgcaagctccgtctcctgggttcaagccattctcctgcctcagcctcctgagtagctgagattataggtgcccgccaccaagcccgggtaatttttgtatttttagtagatagggggtttcatcatgttggccaggctggtcttgaactcctgacctcgtgatccgcccaccttggcctcccgaagtgctgggattacaggtgtgagccactgagccccgtccaagtaatgtttttgaatgagtaagctgtgctgtgctgaatctgtagcatgccttggacatagaccttctccagctgggattgaagtcttagaggaatgcaaaggtggaggggccctttgagaatatggaacgacgacagctctgtatcaccccttttatggaaaaacccagaataactgcccatgtgttctgtgacctttgatgttgattctgtcagcaggaggaatcatctgagtagtgaggaaaatcttggatatgttggtggtttcacagctgtcagaattcactgaatggcacagattcaaagaaggcagtttgtctgccaaggattccttgataaagctgattaaaaatcgctaatgaagacctaaagtgaaaagaggcagggaggagaatctaatacatagaaaccattctacacatgaaagaagagtcagaagcaggaaggtcattctcaggagccgctgtgttttggcctcgtgttcaatgctaagtttcaaaacaaatgtagtattccttgcaaccacgagaagttggtgagtgatttgaaatcattcttatgatgaggcggaagcttttggaatctgttctgtacccctgcactttatccttgtcctcatgatttacaaaaccatgaaaataaagctcagttaattcatcatcatcaaggtgagcaccaggttcagtattcagcttgaggctggggactccatctttctttaacttttgactgaatagccttcacttagtttttatatctcttaggcattaaaaaaattaaaaaaatatatatatatattttgagacggagtctagctctgtcgcccaggctggagtgcagtggcatgatctcggctcactgcaacctccgcctcccgggttcccaccattctctcgcctcagcctcccgagtagctgggactacaggcgcccgccaccacgcccggctaaatttttttgtatttttagtagggacggggtttcaccg[131 bp omitted]ttaattggtttattgttattttttggatggattgctgtcttatggacttagtctaacatattcacagaaagttggattagattggaagaacatacctgggactgcattgcgcagaactctttgagggccagggtttagcttgagttcccctgtccgtccatgagatcccagcttgagatcattacagccaccatgtctcgggaggaggactagtctgcaatgcagtgattatgatggaatgtttcaatgtttttgaaatgtttggactattctgatgcaaaaaactttctttttatttttgagacagagtctcactgtgtcgcctagggtggttttttttttcttttttgaaaccctctgttattaagagataaatatgattcccaggaacattgctctgttctgctttattattattggtcatatctggtcatacgccctgaaaaccctgaaaatgggattgctaaaatcgccttaatctaaactccatttccctcccacttgctccctgggcttggagcacaaccactcaaacagaactggcttttggtcagtaaggaagaagtgagcaacggctgcggtgtagaccctcgtcaatgcctgcgacggttacacctggagacaagctccccagtgtcctcaggagcagcggagatgagaatccatgatagggtgggctctgtccccctcagctccgtgatgccgaaatgcactgctggtcctggtcctgctcctcattccacacccggctgagtgcccatctgaccccagacctcaacgcgaggttctaagcactgtctcctgacccttcaaccccttcgggattttgcatgtgctgttggaccacctcactcccacctggagccaaatgacactgtaggaggaggggaagagaacttatgctagtagagtgtgtgtgtgtgtgtgtgtgtgtgtgtgtgtgaatgtgtgtgtgtattatacataatatatataattacaacattgttaatggggccgggcgcggtggctcacacctgtaatcacagcactttgggaggctgagacgggcagatcacatgaggtcaggagttcaagaccagcctggccaacatggtgaaaccccgtctctactaaaatacaaaaattagccgggcatggtggcgtgcgcctgtagtcccggctactcagcaggctgaggcaagagaattgcttgagcctgggaggcggaggttgcagtgagccaagattgcaccactgcactccagcctgggcaacagagtacgactccatctccacacacacatacacacacacacacacacacacaaattgttaattgtatatgtataattataatagtttatatatattaacaattatatataaacttgcatatatatagtatttgctgtattattatatataaacaattatatatgtaatgactgtataaaatagataaacaattttaactaataatattatattaattatattattattagatgtaataattataattatttatatataatatttattattatgtatcattgttagaacacttaacatgagctctgtcctcttaacaaatttcaagtgaacaagacgttattgctgacgatgggtcgtatgtggtgcagcagatctctaggcctgtttgttaataactccccatttccccctcctcccagcccccgtaaccaccattccctgctgtgatgttgtgactctggtgactttgcagatctcctgtaagtgacatcatgcagtacttggtctctgcatctgcgtcgcttggcgtgatgtcctcaggtttcgtctgtgttgtcgcccatggcagaattttcttccttgtttaaggctgaatagtattcccctgtgtgtgcaccacattttctatatcaattcttctatcaatggacatttagatgattttcacgtcttagctattgcgaatagtgctgcagtgatcaggggagttcagacggctctttgcatactgaatttgtttcttttaaatatagacccagaagtggcattgttggaccatacggtagctctatgtttagttttttgaggaacctccccactgttctctatagtgagtgcacaatttttcagcctcccaaagtgctgggatcacaggcgtgagccaccgcgcccggcgcactgtaggatcttttttaatgcattatataccttgctgagattttagcagagatcacaatattaaaaacttggggaaggatttctatgactcttattttaaatacgaggacatgtcgacttctagttttgtaacatcttgcccaagagcggtggtcgttaacgtgtggagttgggatgacatccaagtcagttggttgcacgacctttattctgtcttgtcccatagatttagaaagaggctgacacatcgggtaactagtttaaggtcatctgatcatgcgggtaagcgacatttttcagaaaccaaggccctccctctcatctcactagtgggaagggtggaaagaacagaacagaaagctctccctcttgtgtgaggcagttgctgtggaagccccacgggcaggaggcccccggccagcacatcctgtctgcttgtgtctgctgcagagttctgggaccggggccatgtctccacacctcactgctctcctgggcctaggtgagtcctggagggagcgggaaggactggaaagggggtcgggaggtctggaaagttccctgctcaagcctgactctagtccagaagattctggggaggaaagtgtcctcctccccccaagactgccctactgctctccctggggcctaagtctgatcagagacaaccttgtcctaaaaacaggggcccgggtgtggggatgaggtcagctttaagaagggctggggggccaggcgcggtgctcacacctgtaatcctagcactttgggaggctgaggcaggtggatcacctgaggtcaggagtttgagaccagcctggccaacgtggtgaaactccatctctactaatacaaaaattagccgggcatggtggcgggcacctgtaatcccagctactcgggaggctgaggcaggagaattgcttgaacccgggaggtggaggttgcagtgagctaagatcgcgccactgcactctagcgtgggcgacaagaacaaaactccgtctccaacaacaccaaaaagaagggctgggggagcaggagcctttttggaagaggagactttgggatttatcttgaaaccattttgcagcaagaaggattacatggagacagtgatgtcgaggagggttggcttggtcgttatgaaatgctgaatgccccccagctccgtcaagcccccttttgacagcagccctgtaaggagactgggcagtgggcatttttctcactggggcttctcttccagtgctctgcctggcccagaccatccacacgcaggagggtaagtcatgccttcgtcccgtcttcccagtcccctctgtcaccccaaaggcagtgctgggtgggagtgatgttgattcttagagggcctggagagatccctttaaatataccctagattgcaaactattccaaatgtaaaatgcataaccctcacccctttctctccttcattctccacctgtcatgttttgcttttcttattttcaaaaatcctatattttattttatttttatttttgagatggagtctcactccatcacccaggctagaatgcagtggcataatctcggctcactgcaacctctgctcccagtttcaagcgattctcctgcctcggcctcctgagtagctgggattacaggcacccaccaccacccctggctaattttttttttttttgtatttttagaagagatggggtttcaccatattggccaggctggtctcgaactccttaccttatgatccgcccgcctcagcctcccacagtgctgggattacaggcatgagccactgtgcccagccaaaaatcttatttttaatcgacaaataattgtatatgtttgtggggcacgatgtgatgttacaacgtatgtaaacattgtggaaagattaaataaggctaaataacatatcaatcacatcacatacttattgtgatgagaacatttaaaacctacttttagcaattttgaaatatataataagttattattaactatagtcagcctgctatgcaatagatctcaaaaacttactcctcctgtttaaccgaaactttgtaccatttgatcagtgtctctcccaagccccccatttcccgactttaatagcatcattctaatctctaactctgtgagatgaccttttttgtttgtttgtttgttttgggatggagtctcactctgtcacccaggctggagtgcaatggcacaatctcggttcaccgcaaactcaacttctcaagttcaagcgattctcctgcctcagcctctcgagtagctgggattacaggtgcatgccaccacgcccagctaatttttgtgtttttagtagagatggggtttcaccatgttggccaggctggtcttgaactcctgacctcaggtgatccacccacctcggccacacaaagtgctgggattacaggtatgagccactgcacccggccgagatgaacttttttagattccacatgcggtatttgtctttctgtacccagcttatttcacttagcataatgtcctctggttcatccatgctgttgtgaatgacagaatgtccttccttttttagggctgaataatattccattgcatatatacaccacattctcctcatccattcatttggtggtggttatataactcaggttatttccaggtcttggcagctgtgagtagcgctgcggtcaccctgggagtgcaggcatcacctccacacaccgatttccacaatgagaattcaaacccaacacaaccaaggctgaacccggcacttttccccagacgagcccacacttcactcggcagcttcttggcggggaacgtgacagtcacaaagggcagactctgaacactcatcctcttctccatcctcctggatgcaccatgtcacccagtcctggtgatttcactctaaatttttctcatctttccctctctcttcatcgacttttcctgcatcacccccaggtgacagcccttctcccctccgtggctccccgaggccggcctcagcctgtccatgccactgctgcctgctcccttcctgaccccagggactggcgatttgcaaaagcacaaccatgaccattgtactttccacagtttttaaattgcattcaaaaattttcatttaatatctcatcgtaagatgaagtttttttcttagagcccttcccctgtttatcttcagatagaatcaacccaggcacctctctttgttctggacatgcccattttcccagccacatcctgtccctgtgacctggggctcactcatctctacattcctccaggttctttcgctttctcaaacactccatatgccgctcaacatggtggttcttctcacatgctgatttttttttttttttttgagatggtgtttcattcttgttgcccaggctggagtgcaatggctcggtcttggcttactgcaacctctgcctccctggttgaagcaattctccctgcctcaacctcccaggtagctaggattacaggtgcctgccaccatgcctggctgatgtttttgtatttttagtagagacggggattcaccatgttgatcaggctggtctcgaactcctgacctcaggtgagccgcccacctcggcctcccaaagtactgggattacaggtgtgagacaccgcgcctggtctgatttttaaaagttaattaattcagtttaaaattgaccgatgaaaattgcatgtatttgtcatgtccaatatgacgttgtggactctgcacacagcgaggaatggctacatcgagctaggcaacgtaggcattcctcctgtgcgaatcatttttttgtggtgagaacgcttagaatcacctggattagcaatgtccaataatgtaatacattgttattaactgtagtcaccgtgttgtacatgatgattcttgaattgatttctcctctctaactaaaaccttgtttcctttgaggaattttcccactttgagtgccctggtgtcccctgtctgctcagctcagggagtttctactcctccctcagctctcagctcagagagagcttcccctgactttgcagaggaggtcagctccaccgcccacctgtcccctagatccctgcacacttacccacaggaaacttattgcagttcgcagctgcagatttggacaattcttcgatcaatatctgtcctcccttctagacgtccacctccaaagggcaggcatcctgtatgtgtttctcacatttgcggaattagcagctcatgaaaagcgtctttaaacagattgataagtaactgagatatggttaaaagaaagaaaaatgaacaaatgggtgggtttggggagatgctggtcaaaggatagaaaatttcgtctagacagggagagtaagttcaggattgtgtaacataatgactagagttaatcacaatatatcatacgcttgaaaatcgctaagagggcagattttaaatgttctcaccacaacaattaactacgcaaagtgaggttatattaattagcttgattcagcgattccacagtgtatacctgtatcaaaacatcatgttgtacaccttaaatacatgcagttttaatttgtcaataataaggaatgaatgaagacgggacgagtgaattgaagccctgccagctctctgccccgctcagggattttgctaattttgacacaaccttcctgtttcagggcgtcaaacccgcccttcctcctccaccccaagcccagttgagataaatggggtttttcaagagccttaataacaaggaaatgcaaattaagctgagaagaaagtagaaactatagaggaaaacccagaggtggtgtctccacagagatctgcattagcaatggggacctgtcacgggctgggcatctgctgtgagcagatcagggctgggggcttcaccctcaccccaccagaccctcaaaggagcctggcaacccccgtcccacactcagtcccacccggggaccggccagtgcccttcaggccccagcacgagccatctccagagccctcgcttccctgtcccttgtccttcacgaatgaccctgtcatccccatcgtgtgcctccctcccaccctctgtccctctagaaagtggccctgggctctgcagcaggcatgaagggctccaggctgctccgacacttcccacgtgaccctgagcaaggcccaagttgtgagcaagtctcagggtcctcactgtcaactgggaaaaaactctgcagtgatgagaatcacatgcacgtagaaggtgcaggaggcgtgggaatgttctaaggttgggctgtggtcgtggctgcataactctataaaattgctaaaatccctgaattgtgatcctaaaatgacgtgtgtggcatggtgacttcctacagtggacgctgagatccttctttgcttccctcttaggggcccttcccagaccctccatctcggctgagccaggcactgtgatctccccggggagccatgtgactttcatgtgccggggcccggttggggttcaaacattccgcctggagagggaggatagagccaagtacaaagatagttataatgtgtttcgacttggtccatctgagtcagaggccagattccacattgactcagtaagtgaaggaaatgccgggctttatcgctgcctctattataagccccctggatggtctgagcacagtgacttcctggagctgctggtgaaaggtgaggacgtcacctgggccctgccccagtctcagctcgaccctcgagcttgtcccgaggtccctggtccctgtcccggctgctgtcctctctctgtggccaccgttgccctcttcctgaccccaagccctcccctccccttcttcctctgcacacacctcccctctgccctcacacctgcttaggtccctggagccctgatctcctctggacgccacagatggcgtggacactcagtcccagcattgggttggctcagagctggctctgcttggctgggtggggagtgggttcccagagattagggggcaacccccctacaaggggatgagtgtcttttcacacaggattgatggtcccatttgttattcctttccactgagccagaacctgccccaggcaatgtgcttctcctggtgtggttcatctcccactgggcagaacacagggtccagggatggcccctgaccagggcgggacagtgctttgggaaaacctttggtatgtgaccacatgcactcctgtgtgtgctcagcccgagatgtcctggagtcaaagtccactggagaggatccaacccatcttcatgtccccccaggacctcagcagtcccctgaggtcaagaagagcttgtggtgggaggagcagagggagtgaccagccccagggagaatggggcaagcagcggggctctccccagcctcctgtcccctgccccgttttctcaggagtctcgagacattgtctgggattgcgtgatggtcatgcggcctttggatgggggctcagggtggaggagggcaggttggttgggacgggttctaaatccttctcctgcccctgtttacagaaagctctggaggcccggactccccggacacagagcccggctcctcagctggtcagtagcagggccctcagctggaggggattacaggggaatctgtgctgcggatgctgttccgggtccagccctctgccctgggcttggagtcaaggtctagggaggccacgggaaggcaccgacacccaccaagctctgggaggtcgctaatgctcacagagaccatagcagcaatggtacagtgattgcaaccttgttccatgccaggaactgtggaaagcacttaatgcaagcaccacttaatgggggaggtactagtctgatcctctaactcctcctcctctctaatatgcaaaacataaattaaagtttcgtgcttaacggcacaaggccatgaaggggcaggggccacccacccgggcagccccaccccagacttccgggctctcccgagctccacgctgcccccttgtgggcgtggcctcaccattcaccccgctctgcacctgatggagggacttagaactcaccttccaacctgggacacccggagagggacggggctgctcctgttggctctgtgatctccgggggaggcctgaacggtggagtaaggtcccttaagaggaggagggctccacagggaggggacgtagctgtgaacggtgaccaggatgaagccatgaggcttcccttccatctggctctgccctggactctgtgatgggagagaagctgcctctggctctgcccctggactctgtgtgatgggagtgaagctgccccaagtccctgggtctcaagttgtccatctccgcctgtgatctgtgaccagaaactgccaggggaggacacggggtcataagccattcgcggccccttccccacctgggtttctatccccagagtacgtccttggacctagacccggtgactgcctgtgaggctcgggctgtgagctcaggcaggtgggaccaggggctgaagccacatggggaggtgggaggagcgatgccgtgctccatccggaccccctcagaggctcctgggctgctggggcacagcgggacatgctcctgagtcccgcagacctggttcaagtccagtgtctggtttttattagccttctgtctgcgggaatatcttgcctctgtttctctccctctcttcttctccttccttctctcttctctcaccttcatgcagtgacatataaaggtcacgagggcagaccctcctgcagccagattgctgggttcatggttcaaatcccggtggttctgccaccccctggctctatgcctgacggtgactcacccaaacctcctgtgtcccaaattcctcatgtgaaacagaggcaatagaagagctgtcctggtagaatcgtttagggcagacttgagttcaggtacacacggcgctgacatcagtgctgattagaaaaccccaaaggagggatgctcctattaatactgaggaagtattttgtcctcacagggactgtgccaggcactgaagcctccggatttgatgcaccatgaatgaggagaaatggcctcccgtcttgtgaacttcaatggggagaaataattagaatgagcaatagaaatgcacagatgcctatacatacatatacaaataaaaagatacgattcgcaatggagaatttcagacctatcatttcaattatattaaatatgttcacgtaatgtattacatatataaggaacataattatataataaaaatatgttaacatatcaccacatatcactataattatattatatgaaagatttatttacaatatatagtacaataaatttcaggtgttattataattaataaacaggtacaaacataaatatatattatctattatttatagattataattataatagaaaaattttatatttaattatatgtttatatgtaatatacattatacattatatattatagtgaatatatgcaacatatattataagtataaatcatatacaattaacattatatacattaaattatgatgtatatgtcaagattacataatttaatatatatttgttatatattatacgtttgcataatacatgatacatataactataaataatataaaaactgtaatattgcacatatataatacatatgtaattttaaatggtggcaaatgttatgaagaccaagcccaggaagtcatggtgtagaataacgggtggtgtcctggaccttggaccgtggaggaggcaggagggaaggacattccaagagagaatgtctgcctttcttgaaggatattgaagatgctgcctcggcagtgggggaggggagggacgctgttcctggaagagggacgcttggctcggaccctgggtttgggggagcccctcaggaccgcatttagccacctgggaattgggtagtggcgtgcactgtgcagaggagggtgaaggttggaggagatgacgggcggcctgcaatgcgccagatgcctgggatctcggctcgctgcaacctccacctcccgggttcaagcgattctcttgcctcagcctgccgagcagctgggactacaggcacgcgccaccacgtcgggctaatttttgtatttttagtagagacggggttccactatgttggccaggctggtctggaactcctgacctcaggtgatccgcccgcgtcagcctcccagagtgctgggattacaggcgtgagccaccgcgcctggccgatatatataatttttaaaacttcaacaagagctcagccagttctttctatggggcaattgctaatttagttctatgcaaatatcgacacattaagtccttgtacacactgtcctcagcgtgccttattattttcccccctttcctcagagaaactatcgactgagacatggagcaacctctccaaggttagccaggtctcaggggcaggggctgcctgaactccaggacaggctgcagctcaccgcgctgggaggtttctgccctgccatactctcaaattttaattt[274 bp omitted]actgctgggattacaagcgtgagccaccgcgcccggccgagctttaattttctatttgtgctcaagtttaatttccttccaggatctgtttcctagacctgtgctctttatttttgccttcttctgttacatgatgactgattttctctgttctttatgtgggacacattctccctgctctctctgtgtgtgtgtgtggtgtgcgtgtctctgcatctctgtatctctgtctttcttctctctggttgtttttcaactattagcgcagtgtcttctcccatcacgtcttgtttgtttggcttggaccctgaggtggacaggtgggtaaatgaggccttcagcaaagggtggcagcttgaccttagcagaggaggctgtgtgaatttttctaccccttgcagagcacaggagggctgagccgacccccgtacctgctccagtgtaaggaagtccaggatgtgcaggcagccaggccacagtgaaaagcaggacagtcatggtttaagggaaattaaacaaaagcacccaactgttcttttgtggggattggtggaaagaggatgggtccaggcagaggacagaaaagcagaggcagcgactcatcttttcttctggatcctccaacccgcccaatgcaggggctgggactcagcgcgatgggtctggggacactgctgtatggagaggatgtccctcctgctccaccgcccccaagcccacctggaggaggagccacgtttaacacacccggtggtgcagtgtggccaggcagagagggaaggcccaccctgtgatcatgaccgcaccctaattcccctgaggagtgtcctgggggtgaacatcagggggctgcagtggggcccaacatggaggggaggggaggcctcacttgggccagatggggcagcagcagatactcacaaatgtccctgaatccctgggactaagtggacattgagtcaacaagaagggtccccaggccttgagggagcagagagaggaaggaaggacaaatggctatcaggtacagacatcagtgggatccccccggcaatctagtaagcaaaccccacagaccccagtcagctcaggcccaaagcccaaaggccagcaggagggcacagaaccactgtcccaagcatcacctttgaaccctgcttcctccatattgggcactaccctgggaaggagctcaggagagagggaaagtgggaaggggaaatcatactaaagaaagtgaaaaatgattgtgaagggctgagtttaaactccagggagtgtgtgcgtgttcaccaggggcagcttatgaggaagagtgacatcaatgatagaagacgtatttctttttttcttttctttcttttctttttttttttttttgagacggagtcttgctctgtcgcccaggctggagtgcagtggcacaatctcggctcactgcaagctccgctcccaggttcccaccattctcctgcctcagcctcccgagtagctgggactacaggcacccaccacc[176 bp omitted]ctgatctgttgcacacacacacgcgaagccacaccaacacatacacggatggaatcctcactggcgtgcaatgctatttaactcctcaggtattaactacctaaggaaagaaatgtaattcattggatttttgatgatgcttcagtgaaataaaccagagtctgttccatcgaaaatgccaggtaaacgttgactatttttatttttctctgttttatcatgcatatataacaggcttccccccccaacagggtcaatattttacgggcccttttataaactgcttgttctgttaaaaattcaccagaagcatccctccttctgttgcacgtccgcaatgagccctcagtttgtagcacatcccacactgcacaccctcctgaaaaatgcttggtttgtgtgataacatgccctgtccctttctctctccaccaggcttttccatgtggagaaacgtcacttaaaatgtttcacatttgatagggagtcagtggcgctatgtatggactgtgcttcagtttctttgcatgtggtttttttttttttttttttttttttttttttttttttttgagacggagtcttgctctgtcacccaggctggagtgcagtgacatgatcttggctcattgcaacctccacctcccaggttcaagcgattctcctgcctcagcctcctgagtagagtagctgggattacaggcatgtgtcaccacacctggctaatttttgtatttttagtagagatggggtttcatcctgttgaccaggctggtctcgaactcctgacctcaagtgatctgccccaccttggcctcccaaagtgctaggattacaggcgagagtcactgtgcctggccaaaatgtggagaattttaataggtattttgttgccgaccttttcttcctgtttccttggggattcgggtggttactttcacacagaaagaaaacagcttttcctgaggacagtggttcccaccatggaactgagacacgctgagcgtgtgagagatgcccagagtggcagtcatggcatcctgatctgcagaccacttctcggcttctgtccagagcagaggccaggtgtctggacttccctttctcagaccgttggaccagctgggcagggtgttgaagaaaaaaaaaatccagtgtcacttgttgaggcacaataaggaggacattattcaggactattgctgtaggtacagggaccatggtgatggaattgcacagtgtgggaaagagactgggctcaactctgagtagaacaggaaaagtgggaatttgtagccttggagcagggtgagcggggtcagtcagtggaaaattgctaagagaagtcctcaggggttaagaagaccctggctaaaccgacccagcaggattcttgctgaaggcaggccaaggcggccagacatcacctgaggctgatggagaatgaaggttcttacctgtgaaccatctgattaagggtgatcagatatctagagttaaactgactctgcaggattctttcttaagtaagaattggaaaagagttgcaattcttactaaaattgggcaaagcagagataaacatggaagcccagaggtcagggctcgttggaaaagagctcagaggagcctgagtcgagcatggtcaaggagatcgtctatctgaagggagaacgtagagcctgggcaggtgttggggaggagggtttagaccaagaatcacaaagctcatgggccttgcttcatggagggatcacagacccaagagcttcattctcttcttcttgaagaaatgtgaccactggggctgggtctctcctgggcttgagagtgaggtctggggaaacccacaggtctgtgcccttggagaggcttagcccacctgttcccaggaggacaccacagccaacagtgagaacctgtcctccatctctatcagactacaccttgctgaccccaagaaccagaagggagtgtcttcccctaggaccccagctctgctgggagacctctcgtacccatggcctctgccagtcactctcacctgtgaccctaaaaagtctcaagcccttctctgcatgttcctaattcttggtccatcctatcctcttggggatggccctttgcatggaacatcactgcaggcctcaggaaccccaggacagagcagagtcctccgcttcctccatcctgtgagcaggtgacttgggatttcagatgaggctggcagtgactggagatttcggaatctgacagatgcttttaactacctggaaggactgtgccctaagagacagaagatatgagaagcatgagaatccactgaaatgtaaagggctttagagctacaagagaagctctaaaaagacaaggaaatgcagaaagcccccagttcctcagtggcttgggagggaggtgcagacttcctgactatacaggagatgatgggaagactcattacggatgggggctaggagaccacccttccttagttacgtgttttgtgctgtgtcttgacaagagagatgaatcagggtcctaggtgagaattcaccaccatccaagacctaaatgggtgtgtgtagactctgaagtccaagaagttctgccgaccgacgtctgcacaaaccactctcagcaaaacaaccactagagtaatccagggtttcagaaagagttggtcttttccaatctagcggagaatatcttctcccagtgagagagggacacacacacacacacacacacacacatacacacacagtattggctctgttttctctgaagtgtgtggcctttttttttttaaggtgttgtagattacttggaactaaatagaggtgatggttgaagaagattatgaatgcaccaaattccactgatttgtacacttttacatagttaatggttagttttatgtttgcgtactttattacaataaaaagtaatgatatagtatttgtagagcaagtagcaaagtcccaatatgagtagaatcttatcatgctcataatttatacacacagtgcattgaaataagacactattttcggacaggcgcggtggctcatgcctgtaatcccagcactttgggaggctgaagcgggaggatcacaaggttaggagtttgagacaagcctgactaacatggtgaaactctgtcttcactaaaaatacaaaaattagccgggcatggtggcgtgagcctgtaatcccatctactcaggaggctgaggcaggaaaatcacttgaaccagggaggcggaggttgcagtgagccgagatcatgccattgcactccagcctgcgtgacagagtgagactccatctcaaaaaaaaaaaacaaaacaaaacactattttctattaccaaggcaaggccagagtgattccctttttgcttcctctctgcccacgatggtgtacagtagaaaaaaaaatggccttatccagatgtcaagattccatagttcatatgaacatcatctacaccttgagcttctccacctcttgctaaattctgactcctattccaaatgttcccaatatatctggccctatatctagacaccattcctatttcccctgtctggatgcagtccaaggagagtggttcttgcggttactgtttacagtactgactgggatgctggcgcctgtctgtagtttcagcaccatggccagcgtccaggaagccacacagctttctccattgtcgtctcttagttgatcatttgcatatgctgagtccctatcttgggactctgaaatagagtcttcctggaaaaatctaatcagtaacttttttttcagggcaatattcaggcattagggtaaattggaaaaagaggatgccagttgttaaggcgatgtttttggaaaaaaaataacccttacattccatggattctgcaagcaagtagaatggcctgttgtggggtcgggggtgggggagggggagggacagcattaggagatatacctagtgtaaatgacgagttaatgggtgcagcacaccaacatggcacatgtatacatatgtaacaaacctgcacattgtgcacatgtacactagaccttaaagtatatacattaaaaaaaagctcagaatgtgggctcccacactcatcaggacaactagaataatccagggtgtcagaaagagttggttctctccaatctagctgagaatatctcttcccggactttcaagataccagctattgggtaatggccaaacgacaacaggctttaaatcacaccaaactgctttcaaaacctgaatctgaccttgctatctttatgtgcttgggagagtcacattacctgtctaagactcactttgcttttccataaaatggcactaataatgctgtctgctttgtaagcatgtttggaagacggatgatcggggattattatattctgcctctctgtttagctaggagggaaggctccggagccaggaaggctgggatatgatcattgctttgtctctgaaaactatgagatttaggaaaattacccacttgactcaattttgtcatttataaaatgagggcaatgccagtacctaccttatatagagttttggtggagaacacatagttactgcatgtgacgtgcaaagtaaactctgaacatgttgttagactcactcaataatgtgggctattgtgatcactactataatgttactctaaaaacgatgataatattatcatagttttgtggctacacagagcctgataaactttgctcagtaataatacctgtttttatgaatcattgttaacattttcttgaaggtccttggacatctgacatattccctgatttactttccaaagttctgggctccccatctcaagcttacagacttagcctggacggatgccggcatttgtttttttcaaatatttactcagcaacatctcctgggactcgggactctgatgtgccacatcctgtataggaaacaggtgatgtggaaatgagtcagactcagctcctgcccctgacagactctgacagagaaatctgcaatgcactgataagactctgctaccagaagcttaggcgctgctgaaacgcaaaagagataccaatttatcttttcctaaggagtgaaggaaagccccttggccatgaaaacccctcagatggtaccaaaaatatagacaattgatccagagaggaaaagaggggaaggaaagagtagagagcatcctcaaatgagagagcagtgtattcggaagcatcagtagctatgagaagctacaggctcaaacaaggggaaagatttaggaggagaattattctcaattgctggagtgaggggttgagccaaataggttaaattaaaattttcattgttgaccatggaagggctgcgcactggggcaataggagaaacctccaggagtgttcagggaaagaaagcaattaaacgtggatcatgttttttgttgttgtttttgttttttgtttttttttctgagatgaagtctcgctttgtcgcccaggctggagtgccatggtgtgatcttggctcactgcaacctccacctcccgggttcaagtgattctcctgcctcagcttctggagtagctgggattacagtcatgcaccacaa[134 bp omitted]gcctggccagataaatttttaaaagagagggagatttggctgggcatagtggctcacgtctgtaatcccagcactttgagagactgaggtgggtggatcacctgaggtcaggagttcgagaacagcctggccaacatggctaaactccatctctactaaaaatacaaaaattagccaagcatagtggcaggtgcctgtaaccctagctactcaggaggttgaggcagacgaatcgcttgaacccgggaggcagaggttgcagtgagccgagatcacaccactgcactccagcctgcaatagagagagactccatctcaaaaaaataaaataaaataagaagatgactgtgggaatggtaaactgatttccaggatgggatacccaaaaggcactgcagacctggggagagggtagcagcaatattgactttcattgtggacacggcgagtagaaaagtcctgtagggaactctataggttcttgcctaagggaagagtcacaaagctgttggacagaaatggaaacactaccaaaagcatcaacggagaagagaaaaaggaaaagagtacaagggatggggatagggtagaaaaggatgattctcaacaagtcaggatttctcctacccaaacatctatggtatacacctgccactccttgccaatacttttgtcattatatatatatttgagacagagtcttgccctgtcgcccaggttggagtgcaatggcgcaatctcggctcactgcagcctccaactcccgggttcaagtgattctcctgcctcagcctcccgagtagctgggattacagtcacccaccaccacaccctgctaatttttgtatttctttatttatttttttagtagagacagggtttcaccatattggccaggctggtctccaactcctgaccttgtgatccacccaccttggcctcccaaagtcctgggattacaggcgtgagccactgcgcctggcctacaaatgtgttaatatctcagggtgtgtgtgtgtgtctggggagggccaggtggttttctgtgctgagtttgctctgtagggaagagctgtgttttctggggctgtagagtttagctcagtcctgatcatcagcaatacgaatgtcaaacaggaaggcttgtgtcttatttggatgaagatgcagacctgtggaaggattttgatcagggccagaaacaggaaagtttggggctatgagaattaatagacatcagcagcagtgagggtctggagtagggggctgggaggaggctgatgtggtgacagagacacgatgtcttcagtctccagctgagcttggactgtggggatgggtcaggggacgtgggtgaggagggactcggggaaagagctgtttggatttgttcacggtgtggggagcagaagagcgtgaggaactgagagttgctccagtctctgccttggttcactggaggagccgatggggctgtctcgggatggatgaccccaggagaagcagcaggcaggggaggtgttgataagatggataactggcctcagagaaagcagagcctccctccaagcccgagtgtgtggttttgttcctcccaaacacttccttcatctgacttcctttgttctataattagcagcaccttctcttcattcttctctttcaaaacctctgattcatttctacctcctcactacagtgtgttttctgaaagttctcaaagcacagactaattcccattttccaggagaaccacacatttcatatggcttcaagccagacaatgggaatccacgcagagagaacatgcacgcacacaaacaggaaggacgcagacgggctttgggggtgacgagggacagcttcaccctgaggtctcaggcgaggggtgaggaaggagactcatgtgaactcctctgtctctgctctcaggcttgttcacaaaaccctgcatctcagcgcacccaagccccctggtgcacgcaagagccagcgtgagcctgcgctgtcactcagagctggcctttgatgaatttatcttatacaaagaggggcacacacaacattcccagcagtatggtaggatgatccaggctggggatcactccttcaaggctgtcttttccatgggtcctataacgcctgcccgtgcagaagcctataggtgctgtggctgtttcagtcactcctgctatgagtggtcggctcccagtgaccccctggacattgtgatcacaggtgagtgtggctggaccattcatggtcttttggtgcccaggaaactccccagggtgatgtggttgttgatcaaaccgccagtagaggaagaaaaataccagaacatagaaacaccaagtaacttattagagggccagaggaggggatgaaggaaagggggagaaacagagaacttgtgatagttaaagagaaaacaagttagacagtgacagagaatgtgaaacagatattgagagagattcgcaaacatagacaatgcctcctcctgacctctcacctgtgtcctcaatgcctcctcctgacctctcacctgtgtcctcagtgcatcctcctgacctctcacctgtgtcttcagtgcctcctcctgacctctcacctgtgtcctcagtgcctcctcctgaccactcacctgtgtcctcaaacatcacttcctcatgactccctttccgcaacagaagagctatgccagtctattttctaatcacccacagccaaggaatgattccacatacgaatgtcatagtgcgtagttacctgttttgtagttatttctagacatctatcacatcccctagactagcagggctcacaggacaggatccatgtcagtgaagcgtatgctttatttttcattcttggttaattgtatgaaataaggttgacatttatagacatatgctggcagaatggatggaagcatggatggactataaatggacagacacagagggaagagttgatgatgtattcagtattcaaatgcacacttaaaatctgtcgtatatcaagccagcaacctctcctgctgctttcccccttgaattctgggatattcagctctgctctcagtttcctggctcagggatttcctccttgtccattttgcccaggtgagacgcacacagagatcacaaactcagatcagcctgacaaatcctaaagcaaaatcatacctgcagcattgactatataatccactggaccccatgcaaaatgaaaatagagggccccatgttcaaacatcaagatgtcaacacgagggcattaaactcagcttggaactctgatggcacggctcctggacagtgaagccagccctgcacagagacataagcaattgggggattgcacacagcatataccaggcacctcgagatcccagagctgcatgcacccaacacacgccaggtattccagatgcatcagacagaaagtgcccctggaggtgatggttgcagatctgggggcctccaaagcccacttcgccactctctgcttcagtcgtcatactggacatggactgtgtccctgcacagaccctgtgtatacctagtccgttcactgcactgcagggactcagacttggtaactgagtgtatgaatgtgtatgaatgaaaatagcatgttgattgtgttggattatctttacttaacaaagtggcatgcagttttatgaagttttaaatggaataaatagtgacgtcttcacataagcctccttaggaagtgactaatatcacccacgcttacaggatgaggaggttgagcttcacagcttgtgcagcaggctgagagtcacggagcaaacaggccgcagatcctggaatgagcccaggctggcagaggtcagaacccagtcttgtgaccacaatgctttgccacctgtgttagcttcctggggctgtcctaacaaagtcctgcaatctgcgtggcttaacaccacaaaatcaattcacttataatcctgggaagtagaagtttgcaagtaaggtgtcaaggaggccatgcccactctgtaggttctaggaaagaatccttccacatcccccccaccttttttttttttttgagacagagtcttgctctgtcacccagatctgtggagcgatcttctctcactgcaacctgcacatcctgggttcaagtgattctcatgcctcagcctcccgagtagctgggactacaggtgtgcaccaccacacctggctaatttttgtatttttttaatttaatttttttttgagagagagtttcactcttggcatccaggctggaatgcaatggtgagatcttggctcactgcaacctctgcctcctgggttcaagtgattctcctgcctcagcctcccaagcagctgggactacaggcatgcgccatcatgcccagctaatttttgtatttttagtagagatggggtttcaccagctggttttggccaggctggtttcaaacacgtgatgtcaagtgatctgcccaccttggcctcccaaagtgctggcattacaggtgtgagacacttcctggccccaaatcattcattcattcatttattcattcttcattgagtcattcggtaattccccgtatagttactaatcactaaatgtgtgccaagtacggggctcctcacttcgtacaattacggtatattgtagacacaaagagtgtcttcatggtgggaactggaggagaaacaatgaaaaagtggagaaatagaaataaatgacatcaatgataaattttatgaaagaaaatgttaaaactaaaccatgaaaactaatacagaagcctacttgcctacggtggtaaggaaagaaatcttggagctggtgatatttgcactcaacagtgatatgaggtgtggggagagggatggaagttgagatagagagaagagcacgtgcaaaagtcctggggtgagggaaatgtgaaggatccatttcttttgctgtaaataagacaacatactgtcctgagtgtacgtgggtatttataaagtaataatatttatctaaaacttggagtgaagtatctgaatgaacgtatgcttcgagtaagggttataaaccattgtgtctatttatgtacagatgagaataccacatattccagccctgccgtgaaggaaaggtggaatcagagatgaggaatcttcagctcagataggagacacacagaaaggtttgcatgtggaagtgccagcctgtcaacctctccagaggctccagaagtgaggccagaattttgatgataggagatagactttggaggtcatcacccacatcccctgtcatggtcactgtcattgtccctattccaggcagtcagaaggaaaaatgaaggatgaacataatgcgttgggttcaatgggccagggctggaagcagccacctctcctgggcaaagcctcaatttcacagatcttctcaggtgagaattgaatcactgcaaatgaaaagcttgcccttgggttgtgtcgacaggtttgaagcaggcagggaaatctattcatggcagagatataaacggtccctttattctatgggtggatgtggatcaagaattctagacacacagggtgaagcctgtgtccaaactaataggaccttcacactgttttcagcatggagagctcacaagtattggaggattgggagaatggggtgtctagaataacgtaaagcaacaggaagcttgattcacccagatgggtaacctgagcatatgccctcctatggatcagctcaggaattccacgctggcttcaacacaaaggccttttcacccgtgcttgctaacattcagattcccattaaagatgtgtgtttttaattaatcatttcaaataaaaccttgacattattttgcattaatttttcatgtttaagtaattggtttaatcgagaaacggaagtgcatgaggcagatactaagttagttaggtcattgcaaatatttagttggacttttatcatccctcggcctcagattttctgaagcctctgatgccgttcacccctctgacctacgtgaaagtagctcttatcttgttcaccttttggaccttgtttcaaaagtaatgatagaaatgagcagtccagttgagaaaacaagatactctgggagggtaggtgctgaaaattcttggagaaaccaaagctgaagacaagactctcaatcaattgatcttggcaaggaattgtgttttctctcttcactgtttaatactggtcaatacaattatggatgttttgatctggagtgattctttgttaacatctctcgtattcatccagagaatgtaaataagggcataaaacaaatgtaaatattcctatgataaaataattattctgctatggagaatattggatcttgctccttagcgtgggttatttgggtgaaacactgagaaacatgaatgtcaaagagtcctacactgtgaaaccccgtctctactaaaaatacacacacacacactcacacacacaaatttgccgggcgtggtggtgggcgcctgtagtcccagctactcagaaggctgaggcaggagaatggtgtgaacccgggaggcggagcttgcagtgagccgagatcgcgccactgcactccagcctgggggacagagtgagactccgtctcaaaaaaaaacaaaaacaaaaacaaaaaaacagtcctaagctttctaggaccaaggaagcagctactcactcgcaatcgctagagtgttcccatcttccaacacccaccttgattttctctagtccagcaatgagtcaggtctcagcatggtcgaagcagggaaggagcatctcatgctgctttccttgtggtcataccttgccaatgccacttccagaggcaggtttttcattccttctttcagctttcagggtctggatactctgaggacactggttttgcctctgtgcattgatgaatgcctccgttaatctgcaagtgaagagtaaggaaattgcttttcacacattacttagagggcttttggtactgtcagcgaaggacacttgtctgatgatatcgatgtcaaccacaacttgcaaaatatcccatagactcaaattttaggaaactattctaaccaaagctcatcatctgaaagctgttgctctatgcacagggtcctgggcttctctgtgtgtggctcttccccccacacaggagacccatcctctcgtgagatcttcaccctgcgcaggagacccgtcctctcccgagatcttcgccccgcgcgggagatccggcctctcccgagatcttcaccccacgtaggagacaggtcctctcgcgagatcatcaccccatgcaggagacccgtcctctcgcgaaatctgcacccctagcatgagattccctcctatcgcgagatcttcacccaactcaagagacccgtcctctcccgagatcttcaaggcacgcggaagacccgtcctctcgcgagatcttccatgcgatggctcctgcctctgctcatatccaaactcctcctcagccaggtgtctgatgactccactgccatcatcccagaaatttgttcctagagaacacaaacaaatttcttctctattcttcataccaaagaaaatactatgatatttctgcatgtttatattattgttaagtgaacggcagtaattgcttatcttccaaaacgaagagctgagtaatgatatatctttaaactccatccttttgacagtgattgaaatggacaaaacagtagaaagtagagctgatatgtgtgatcacttttaatgacacagattaacagtgaaaaccacaaagacctgtggtacttgtatctaggtagtagaacattggcctgtaaacacagcacttcgggaggccgaggcaggtggattgcctgaggtcaggagttcgacaccagcctgcacaacatggcgaaaccccgtgtctactaatgatacaaaaaattagctgggcatggtggtgcaaacctgtaatcccagctactcgggaggctgccagatccagccacgagacacctttcaaaaaaaaaaaagaacttggtgtataagataatttttacactgccataaagaactacctgagactgggtaatttatgaagaagagaggtttaattgactcacagttccacagacttaacaggaagcatgactgggaggcctcaggaaacttacaatcatggcggatgttgaaggggaagcggggaccttcttctcatggctgcaggataaagagagaaccaggggagacgtgtcacactttcaaaccaccagctcttgtgagaactcatgatcatgagaacagcaagtgagaaatctgcccccatgatccaatcatctctcactgggcccccctccaatacatggaaactgcaattctagatgagatttgggaggggacatagccaaatcatatcattttgcccctggcccctcccaaatctcgtgaccttctcacatttcaaaaccaatcatgccttcccaacagttcccaaagtcttagctcattccagcatgaattcacaagtccaagtccaaagtctcatctaagacaaggcaagtctcttccccgtataagcctgtaaaattaaaaacaagttagctacttccaagatacaatggggatataggcactgggtgaatgtttccattccaaatgggagaaattatccaaagccaaggggccacaggccgtgtggtgatgggtttgtaggtgcagcaaaccaccagggcacaagtttacttatgtggcaaacctgcacgtcctggacatgtaccctggaacttaaaataaacaaaataacattgattataaaaagatatgaggcctagagaatcccaggaatacctccgccgaaccccacaacccacaaccccagtgtcactaggttgctgggacaacactggcactacctgcctcaaaacttattgtgaagtgaaacattaaatgtctttattattaaaacaaaaggagagaatgacaatgatcgtaacaaatactttcaagctttatggacatatacaaattgtacatatttggtgggtggaatatgatgttttgatgtatgtgaaataattaccacaatcgagctaacaagaaagtgtctctcccctcacagggttatcatttttgtcttcatttttttttatgtggtgagaatatgtaagacgtatcctgttagcaaatttcaggtgtgtaatacagtctttttacactatagtcaggcgggttttgagtgtgggaaatgaggacacgttggtcaaaggctacaaagtttggttatgcaggatgaaaatgttctagagatctaatgtaagcatggtgacgatagctcacagagcttccgatggaagaggctattttgtgtgcagattttgccttgctccaagatggcaaaactgcagaagaaattgtccaatgggcagaagaaactggaggtttattgggatgtgttgacttccctccaccaattgaagataagagatgaccagaattcaaggtgctgcctacttcacgttagtattgaggaaggagctcattcctcttaacaatgaagagtaatcagattttaaactgtcatggttgctgtaaagaaaaagcaaagcgtaaatataccctaataaaatttttgtgtataagaagggaaactattcagaaagtgaaagtgatacaaatatgagatagccccagagaaatttgaggcacctcgagtttctttcaaaaataaaatgcaattgggaagccaaggcaggcggatcacctgaggtcaggagttcgagaccagcctgcccaacatggcgaaaccccgtctgtactaaaattacaaaatattagctggcgtggtggtgggggtctgtaatcccagctattcggtaggctgaggcaggagaatctcttaaacctgggaggcagaggttgcagtgagccgagatcatgccactgcaccccagcctgggcgacaagagtgaaacttcgtcttaaaataaataaatgaataaataaataaataaaatgcattaaaacaccaaaacatagaaatgttatataagttagaagagttatttccctcattttaatgatgctaaaagtgaggtaaaaataaaaagaaattcgtgaatttataagaaatgtattaaataagtgaaacatattaaaatacagaaaagataaagtaactgtagctggaaacagagagaggcatgcttgcagaaagtatataaaaagggatggaaacatatacatatttaaaaaataatcagccagggtacagtcatatgaagacagatcaagaacacccaatgtttttaaaattggaatttttgaagaagagaacgcaagcaaggaatagataggatctagtttatttgtccaggatccatatttgaaaaattcaggtatggcttatttctgaccttctgaatttactcttttatatgtttttccagaggaatccataagcctgttaggagattaggctacgaaatttctttaaatgtacctcaagtgaatagaaccttttaaatcatcatgaatggacacgaaactcaccactggctcttgcctgcaagagccttgtttctttacctaattcatcaactatttgtatttattgtttgggcagcacttctggaaaatttgcacgatatacctaagatctacagatgatgtgggtccttctggaaataattcatgaaggaaaatagtttaaagacatactaattaccatgtaatgcatcacgggcattcaatatttagtagagcttgttttagtgaagagttgcgaatttaggtattgaattcagtaatcaaaatatgccccacatcaatatcccaaattaactcctgtaattatttatacttctcaacactgctttaaaaagcacagaatcacattcttcaatataaaattaaaaatttcgaatttcatggaacgctttgaaatttttatggacttaaccctcaccttcaaaagccaaacttttgaagttatcagtgttcaaattttccttcttcaaaggccacggcccctctgctattacttatgctgtgtcttgttctcacagtccagtgtacgcttacttcttagaactttaatttgtactaaataaaaattgcactggattaaaacagtttacttcataaagctgttggcctcatcccaatgtgtaaacactgctaagctgtcttcctggcaagaaacccgtaaacaccatgaagtacatttagcaacgtcaattaacaagttctcctcatttttaaccaatgcatgcgtcatatttttaagtgggtatttgtcccgtgtgtttgcttgcagggtgactgtccactactgaggtcttgaactttgcaaatctcacttccaagtcaatcaattataacacattttatgaaacatagcacaatgtttaataaatggcaccattgatttgtaaaaattatttctcataggtgatacatttgcttacaggtacagatatttgtatcacagcatttattcaacatatttttctattgtagaatatatttaagtaaatgttaacatcaagttcatcctctgtcatctgtaatcaggtattttctgagaagtggaaaaaacaacagaatctgacaacggttgctggcagttttggggtcatcattctgtaaaacatgtgtttttgtcagtttatttttatcttgacattccccatgtcctgcagtcccaccctggggtgtgtactcagggaaactcactcataaaacccaggacactcaggcaagaatgctccggcaaacattgctccaaaaaacaaaatgtccggtgaaaacatacatcatatctgcccaaaaggacaaatacattgaggaatatgcaagcgatttactgcagtctgtctgttgttaaataaacaagagctatgcagagcattaggagcatagcggtatcattttacaatcaaaaacacaaaacaaactatccttttgtgttatatttaaaacgtaaaaatatacgtacatacacacacacaaatattaccagatgatagctatgatatcagagacacatatttacaaaaataacacagaaaagatccaaaattgtatgtgtgtggttttcatacattgagaagttctgggacagatgagagacaaagcatgagttgatactatttttatgaatatgctgttttttttcagtgtggatttcacagggctttttttcttgctataatcttactaattttttaataaaatgaattggcttttggggagaaccttcagcgttatatgcacatatgtttgtgttattcagagtttatatatgtatgtaaatatacacatagagagagtagagttttctggaagagaaagatagagatctgtgtcttgaactgtgagtcaagaaaggatttcagagaaaacatcaagaaccaggattttcacgctcgcttctgtgttaataatgcaaaatcagtttttcttggtgttaacttcttgaagcataggagaaaaattgaagaacttgaaaattgttcttaatttgcaagtaattaatttgcaactttgaaaatgacaggataaacatttcagttttactgtacaaccgttttacaacactgacagtgcatctattttaatttggcggagaaccttgcatcacagaaatcaaatcatgcatagttctcaaaaaaggcaataagatattaagatacaattctacacttttgcacatagaaaaattaaatttgaaatatagacattatggattggtcggtgctagggttcaagtcaagcctttgttaggggctctgttgaaccaagaataccgtctgcaagtttcctgtgtcacccactatgtttagggtgagagctggtcatcttcctgtgtggggcaccctctaaactctgcaaactgaaactggaaccatggttaccacatcctgttcattttccaatttagctcaacccctgtgtcctgcccaatagaagtggcaccatggcccccaaactcatcaccgtcctgtgtctgggtaagtcctggaagggaaaggaggacacggttgggatggaaaatgctctcttgaagacctggcctctccacaacccaggtctggtggtgggaagccaggttcatccaccctctgaatccaggctgagctgacaaacccagttacaaggagggaaggattcacatgaagacaagctatttttctctcctctcttttttttttttttgcctaggattctgcctgaaccagaagatctgcccacatgcgggtgagtcctatcccagtcctaggatgctgtgttggccaaacacaaatgattctccaggcagggagggtggacacgaagtcaggctgatgcagatgacatggggtgggctttgcagtgagcactgggaacacaggaagggagtcctctggagaccccaggctccattttgttctagaaaccctccataggcagcccctcaggctcatccaatctcctgaaggagcctgtgatgctcagaatccagcgtgtctgggggtgggtagggtaggagtactctctgtcaggaggcagggacccgtgctgggcacttgtgttgggaattgttaaatgagttgatatgttttttgtattgcttgaatctggtagattcctccttctcctccatgtacagatttctgttgtagacaagaactaggagcaacttggctcaatattgtatcatcatgcttagtagaattctgttctggggagaccttccatgtccactctggggtggctgtgtccctggcttgcgaccaggtatcccagggcatcaggggaccccacgttacagggcaaaccagaacaatgtaaagaaggaaatgcccccaaggacagcgggagacggggggctccacatttccctctctaggctgtgcctccttctcttccaggtgctcaggacaagttctccctgtcagcctggccgagccctgtggttcccctaggaggacgtgtgactctctcctgtcattcccatcttcgatttgtcatatggacaatattccaaacaactgggacccgaagccatgagttgcacactggcctttccaacaacatcaccatcagccctgtgaccccagaacacgcagggacctacagatgtgttggaatttacaagcacgcctcaaagtggtcagctgagagcaactccctgaagatcatcgtcacaggtaggagaagtccagcccaccccacgtccaaccggtgtccagatggacctgcccagagtccacacccaatgaagccagagagttgttgtgggattcctagtcatgcactaaccgtggacacagaagccatcctgggaatttaaagagagggcatttcctgtgaggaatcaggtacccaggtggaggaggagggaggaagccgagcagcaggagaatctgcctggggagtagcagacgcagggtgctggtaccaattgcagcagggtggatccagggaggagccatgttgcctgaccccagctggatccagggaggagccatgttgcctgaccccagcaccagtgtttccctcggggaagtcgttactctgcctcgaaggagccagaggcttggggaagtgacagttccctcgggagatgagtccagtggctcagtgggacatggattgggaaatgcacccattcctctcctcctccttcccagtctcgtgacactcatcccttctctctcatggatgtgcagagtgtctcacggagagttagaaactcatcctgtggagtcgcccctgcccatcctataaagcagggaagggagagtgtggagttattcatattttatatatgtatgtaaatatacacataaagagagagagagagtagagttttctggaagagaaagatagagatctgtgccttgaaccgtgagtcaaggaaggatttcagagaaaacatcaagaaccaggattttcacggttggttctgtgttaataatgcaaaatcagtttttgttgttaacttcttgaagcatgggagaaaaatttaagaactagaaaatagttctcaatttgcaagtcattaatttgtaactttgaaaatgacagaataaacatttcagttttgctgtacaaccattttacaacattgacaatgcatgtattttaatttggcagtctcacattcaaggagctcagaagaaacagagaagagattgggtctttccaccaagagagcggggaaagcaggttggggtgaggcagggagatccaggctacgaaagctcctggaggatctgaatggagattgggactgtgaggggctgcccaggaaaggagtttaccgtgtccttctgcctaaacagggaaaaggagtcatttccaccctccccaacaagtagtcacgtctaacctcttgggttttggggcaaaaccagttgttccttcagtgtgagcctgtgagatttcttctgatcctccagagagtcttgtatttttcaacacgcagagttgaaaaacagtgaggctcataacctcacagtcccatgccagggaacctaagtccagcagtgtgttttctgaaggttctcaaagcacagagtaattcccattttccgggagaaccccacatctcatatggtttcaagccagacaatggggatccgcgcagagagaacatgcacgcacacaaacaggaaggacgcagacgggctttgggggtgatgagggacagcttcaccctgaggtctcaggcgaggggtgaggaaggagactcatgtgaactcctctgtctctgctctcaggcttgttcacaaaaccctccatctcagcgcacccaagctccctggtgcatgcaggagccagggtgagcctgcgctgtcactcagaactggcctttgatgaatttatcttatacaaagaggggcacatacagcattcccagcagcttgaccaggggatggaggctgggatccattacgtcgaggctgtcttttccatgggtcctgtaacgcctgcccatgcaggagcctacagatgctgtggttgtttcagtcactcccgctatgagtggtcggctcccagtgaccccctggacattgtgatcacaggtgagtgtggctggaccatccgtggtctgttggtgccatgggagcttcatgtaatgcggttgttaatcaaacctcagtagaggaagagaaataaaggaagagagggactgtgaaaaagtgctcagcaaaggggtttaacatgtcttactgcttaaagaggcaggaggggtcacttctaccctccccaacaagtagtcacgtctaactccttgggcttgggggtacagccagttgttccctgcagtgggatcctgtgaggttccttctgatcctcccgagattcttatatttttcaacaaacacaattgaaaaatagtaagactcataaccccgtagccccatgtcagagaactcaaggccagcactatgttttctgaagggtctcaaagcacagagtaattcccattttccaggagaaccccacatctcatatggcttctaggggcggtaaaccacagggactcagtcaaaagcagaatcaaagaaatgcagaggaagtaaaaagacacagacataggctgactcaggaccctagagatgaacatgagattgacaggggcaccagccgacattcggaatctgctgccaagataagaacagcgaggctgggcgctgtggcttacgcctgtaatcccagcactttgggaggctgacgtgggcggatcacaaggtcaggagttcgagaccagcctgaccaacatggtgaaaccctgtctctactaaaaatacaaaaattagctgggcatggtggtccgtgcctctaatcccagctactcaggaggctaaggcaggagaatcacttgaacccgggatgctgaggttgcagtgagccgagatcgtgctactgcactccagcctaggagacaagagtgaaaatctgtctcaaaggaaaaaaaaaaaaaaaaaaaaagagggagagagattactttgttcatacactcaggcgtgtgttctaaaatcagcctctttttctcctaggaaaatacaaaaagccttctctctccacccaggtggaccccatgatgaggctgggagagaagttgaccctcttctgcagctctgaaatctcatttgaccagtaccatctgttcagacacggggttgctcatggacagtggctcagtggagggcagagacacagggaagcattccaggccaacttttctgtgggccgtgcaacgccagtccctggcgggacctatagatgctatggttccttcaatgactctccctataagcccccagtgacccgctgcaactttacaccacaggtgaggagcccatgcctgctgcatgctctggtgcccactggatcacagagccacacgtgaggggcgtcccgctgggcacacaggggtattaggtactctggataaaatgaaacagtgacaaacacacacaggaaaaaagaagctgagcatgatggggctgtcagggtgtagggtggtaagacggggcagctccacaccctctgccaccttctgtatgaagaaagaggtcaggacaaacacagggggaggtgaggccagatgtagtttgtcgaggtcagaggttgcccctcacccttttccatttctccaaagcccctcctgacccctcaacacagagagatctccctgctggggaacgtggagatttatcatcccgatgggagacaatgtctgttgacatcacccaccatgcttctccttatcaccttcccatcccagggaaggaattgtcccccagagattccaaggaagagaccccagggcccccattagtctttaggtggatgacagagtagggggtgtgcagggaccaagcctccaaagaaaatggtgctaatgctcgggaggctgaggcaggagaatcgcttgaacccaggaggtggaggttgcagcgagacaagatggcaccactgcactccagcctgggcgacagagcaagactccaactcaaaaaaaaaaaaaaaaaagaaagaaagaaagaaagaaagaaaaagaaagaaagaaagaaagaaagaaagaaaagaaaatggtcctactttaatggggcaatcaatgacgcttgctcaccccttctctgcctttttttttcctaggaaacactaagagtactcctctgtcattcacagaatccacccctgaatctggtaagcaaataactcttatcctagtgtctgagtccctggggagacagaaggccccagtgtgagtgaaagctgtgccacctcccagctccatgaccctgggctaggcagcccctcccaggtccccacattccccatccacatctgagactgtggtcagtgcgggaatctgtaaggcctttcagcctcagacgctttgggactgaggcctcatccacaggggaggaagaggtcagagtcacctgacccttgctgaaaagcaatgcttctcattcctccagggaggtctgtgaacatgaaaatgctggaagatgggaaggatttaaaagaccatattcgatattcactgtctgtctttttttgttgttttttttttttgagacagagtctcactctgtcacccaggctggagtgcggtggcacaatctcagctcactgcaacctctgcctcctgggttcaagcgattttcctgcctcagcctcccgagtagctgggattacaggtgcccaccaccacacccggctaatttttgtatttttagtagagtcagggtttcgccatgttgcccaggctggtgtcaaactcctgacctcaagtgatctgtccgccttggcctcccaaagtgctgggattacaggtgtgagccaccgcacccagccttattgtccatcttctaatgtcctatgacatattcaacagttcctgtgttccagtggtgtgtgcagggaggagaaaagttataatgaataaacgtgtgaactgatttattcagatccattaattttgtattcattaagatagagtcatgtgacagagaaagcttaagtggatcctttagagcaggtggaagggaagactctatgtcactcaaggaactgacatttaaggtgtgatcctgatgacaaggacagccagtgttggaaggattgatggaaggacgttcccagcaggtaaacagtggtgccataaactcaacatggcagggctgggcgcagggctcacaactgtaatcccagcactttgggaggctgaggcgggcagatcacaaggtcaagagatcgagctgttcctggtcaacatggtaaaaccctgtctctactaaaaatacaaaaattagctgggcgtagtggtgcatgtctgtggtcccagctactccagaggctgaggcaggagaattgtttgaacccgggaggcggaagttgcagtgagccgagattatgccactgcactccagcttgggcgacaggacgagactccgtctcaaaaaaaaaaaaaaattcaacatggcaatgccttgtgtgtgttcacagcaccagtgaggctgacatgccgggggagaggggtggagctgagagaggaggacagggaccaacttgtgtgaacgtttctcgtttttaaaatgtttaatttttgtgggtacctagtaggtgtgtatatttatcaggcgcatgagatgttttgatacaggcatgaaatgtgaaataagcacatcatggaggttaaggcatccatcccctcaagcatttattctttgagttacaaacaatttaattaagattttttttttttttttgagatggagtcttgctctgtcacccagactggagtgcattggcgcgctttccgctcactgcaacctctgtctcctgggttcaagcagttctcctgcctcagcctcccaagtagctgggattacaggtgtacgccaccatgcctggctaactttttgtattttagtagagacagggtttcaacatgttgtccaggctggtctcaaacacctgagctcaggtgatctgcccgcctcagtctcccaaagtcttaggagtacaggtgtgagccaccatgcctggccccaattatgctttttattttaaaatgtacagtaaagttcttattgactagagccagcctgttggtgctaccaagtgagggtttctaagcaacagtaaagagtttggattttattccaataaagaggtgaagacaagttttgttttgtttttttttcagagtcttactctgtctccaggctggagtgcagtggcgtgatctcggctcactgcaacctctgcctcccgggttcaagtgattctcctgccttagcctcctgagtagctgggattataggcacccaccaccatacccgactaatttttgtatttttagtagagaccaggtttcaccatgttggccaggatggtctcgatctcttgaccttgtgatccgcctgccttggcctcccaaagtgctgggattacaggtgtgagccactgtgcccagccgtttttttttttctttttttttgagacagagtcttgctctgttgcccaggctgaagtgcaatggcgtgatcttggctcactgcaacctccgcctcctgggttcaagcgattctcctgcctcagcctcctgagtagctgggattacagggggcccgccaccaagcctggctaatttttgtatttttagtagagacagggtttcaccatgttggccaggctggtcttgaactcctgacttcaggtgatccacccaccttgacctcccaaagtgctgggattacacgcatgagccactgtgcctggccgaagacaaaggttttagtcagaaacgtgtcatgatccacattctattttagagatagcaatcggccgatgtgaatagtgtttattacagggaggcaggagtggaagccaggagcctggtggggctgtgacatccttgtagaggacactcatggcagcttagatgtgctggggctggagaaggagttgagcaggtggattcaggagaggctcagagctggagtcactaagagggagagtttggaaacttgttccagtatttctcagtgcatgacctggggcacgctcatttctctctgagcctctgattccattgatggcaactcatacttgggctatcagagaagtagcaactcagcagggagccttatgggggaacgagacatagtccttgaaagagaaaagattataatcagacacttgggctcaatggatggctctgctagttatggtcactcatcttggaaagcatccgttttcttttcttttcttttttcttttgttttcttctttttgtttgagccagagtctctctgtgttgcccaggctggagtgcagtggtatgaaactggcttactgcaatgtcccagtttcaagtgattctcctgcctcagcctcccaagtagctgggattacaggtgtctgccaccacgcccggctaatttttgtatttttagtagagacaggtttcactatgttggtcaggctggttttgaactcctgaactccagtgatcagcctgtctgtgcctcccaaagtgctgggattacaggcatgagccatggcacctggccaaagcatccaagttgttggatagaatattgggctaatgatgcctccctccttatggaaaaaaaaaaagtaggaaagagaagaaagaaaagcttcccaagttgaatgtctagaagtagcagacatgtctagaattgagcccaagagtacggctggctacagtcttttctctttcaaggactatatcatggatgagagagtgatgagatgtgtccacacatgtggaagtcctcccaccacctctcagcatgggtcctggtacggagggtatgctcctatgtgacatagcctgtgccccctcccctttttctctcctgaatcctccacccacctgctcttactcattactcagaaaaacaccaacattgtttggagcaagttcaattctcagaaactggcatgagagtcatcctctggccacctctatctccattctcagaaagtgtatttgtcctgggctgagaagggacgagggaaatggtattcagctatggtacatgcagagggtttcctttgtcatgcaaaaacaaactgtcttgtctcatgaggaagtgggaggggaggcacactggagcctggtaggcctgggttcagacctccatgtctctccttttttttttcttttttttttttttttgagatggagtcttgctctgtcacccaccctgtgtacaatctcggcttactacaacctctgcctcctgggttcaagcgattgtcctgcctcagccttctgagtagctgggatcacaggcgtgtaccactacgcctggctaatttttgtgtttttagtggagacggagttttgccatgtaggccaggctggtctctaactcctgacctcaggtgatctgcccacctctgcctcccaaagtgctgggattacaggtgtgaaccaccacaccaggcctctgcatctctcttactggccatttgatttggacacgtgtcttcacttctcttggaattttttgtgtaagtgatggaaaatggagaaagtaactgttcgggtgtagggatcttggaagagcttcagataaagcatgttgtgtgttcagtatgtattggcacaaaacaggcaaccagtcaatgagagggtttatcatttgcttcttgacagacacacctcgccctcaaggacagtccagcaacctgcatatgctcactggactctcagtagccatcatctccattggcgtttgcctctctgcttttattggtttctggtgttacataaaatatcgtaagtctcagggaggggaggacagtatcatgtgagccccgtggggatgtgactggcgcacgggggtgctattcacgtcctgtgggttgatctgtgtttccgctgaggttcttttttttttttgagatggagtctcgctctgtcacccaggctggagtgcagtggcgctatctcggctcactgcaagctctgcctcccgggctcacgccattcttccacctcagcctcccgattagctgggactacaggtgcccaccaccatgcccggctaattttttgtatttttagtagagatgga[144 bp omitted]cttcactgaccaatcaccccaacccctcccctacctccacctcacctctggggaggccactgacctgcaggagatggtccatgagagaggcagaaggatgggggccatctatcggagcggtcctggggcagtcaagattgccccaaggttgctgatgggtggttctctgaatttagtgggggaggctggatcacgctgcagcctcaggcacgcccttgccttgttttggtcttggtattgccacctctgaagtgaagatctggaagactttctttttcaccccacagacaccaccatggcaaacacagagcccacggaaggccaacggacggatgaagaggtgagttctcccagccgaaaccatcaccacagcttcatcccctcccattcccagtgcccctgccttcagccactaaatatgctcctcttttcaccttcatcctctcaggagcctgcagcagaagagacacaggagatcatatatgcccagttaaaccaccaggccctctcacagacaggattccctcctgcctcccagtgtccccactacctctcggaggatcctagtatctacatcactgtccaccaagcccaggctgaggccagagctgcccccagtctttggcacaaagggcattaatacgcaaggacctggatctattcctaggaggattttttttccacggacattcttcctccttctggtaccatcttgacacctcgaagctggcaacagcagtgtctgaatgcttgtgggattatcttaaaattccagcactgctgaacagacaactagccattctacaattctattttgagcatccaaccatttaaggtgatttgactctacccacacactcatcctggatatctcattaatatcatctgagttatcctgaaactctacagacatgcttctggaaagccgatgtatatgctcagccagtttaatctctaaattactcaataaggtttttttaaaaaaatttttttaaagttctggggtacatgctcaggatgtgcaggtttgttacgtaggtaaacgtgtgccatggtggtttgctgcacctatcaaaccgtcacctaggtattaagcccagcaggcattagctctcttccctaatgctctccataccccctgccctcctctgacaggccccagtgaatgtgttcccctccctgtgtccatgtgttctcattgttcagctcccacttataagtgaaaacatgcggtgtctggttttctgttcctgcattagtttgctgaggataatgtcttctagcttcattcatgtctctgcaaatgatatgatctcattcctttttatgactgcgtagtattccgtggtgtatatgtacaactttatttttatccagtctatcattgatgggcatttgggttgattccacgtctttgctgttactcaacaaaattttgcagagatgaagtgtattctatatctgagtcatctaatatggtagccactagccaaatatggctttttaacttagaattagaatagatcaaattccatgaagtttaaaattcagttcctcagccacatggccacaatttgagttctcagagccacgtgtggctgctggctgtgggagagaatagcatgaacacaaaatgttttccttgtcagaggaagttctagctgttctagattaaaggtgcaaatttgaagatgcagagcctattttctcatgcagtgcaggctcctggaagagacctaatgtaacaaaacgataatatttcacatcaatggtgacatgtctttatcttacgaaatgcggggaacaagcagagttctcttgtggagtgtcttatcacctcttatcctcatgcaaatttctgccatagagattttctcccaaactttgagaaggtcacctctgtcaggcctctgagcccaagctaagccatcctatcccctgtgacctgcacgtacacatccagatggcctgaagcaactgaagattcacaaaagaagtgaaaatagccttaactgatgacattccaccactgtgacttgttcccgccccactaactgataccatatattctgccccgcccaagaaggtactttgtaatattcctcgcccccttaccccccaccgccctgcccccgctcgcccgccttaagaaggtactttgtaatattctcccccacaactttagaaggtactttgtaatattctccccaactttagaaggtactttgtaatattctcccccacaactttagaaggtactttgtaatattctcccctccccttaagaaggtactttgtaatattctcccccacaactttagaaggtactttgtaatattctcccctccccttaagaaggtacttcgaggc[142 bp omitted]atggtggcgggtgcctgtagtcccagccacttgggagtc[175 bp omitted]aagaaggtactttgtaatatcctccccccaacgccagccccctccacgaccttaagaaggtactttgtaatattctccgcgcccttgagaatgtactttgtacgcccatctcaaacctataagaacttatgataatcccaccaccctttgctgactctcttttcagactcagcccacctgcacccaggtgaaataaacagccttgttgctcacacaaagcctgtttggtggtctcttcacacagacgctcatgacaacctcctatttgtaccttttctcgtcccctggtttcacatggagagaaagcacacatccattctccgcacagaacatgctctggaagctgctttctgatgacgtcttcctctgagcctttattctgtttctttctacttgaattggcacctacccagagcaattcacaaactgctgcctgcaacgagctgtcactggctcatggaattgtcacatgctgtttcttcacctggtaattatctcccttttttgagcatctcagtgcagacatccaccttcatacacatgtctttatctcataggctaagtgaggaggttgattgactcacagtgtctgtgcccaataggctgagtttttatggcctgatccccactggtctttcatgtgtggactgtgagttttttttgttgttgtcgttgccaggctggagtgcagtggtgtgacctcagctcactgcaatctctgcctcccaggttcaagagattctcttgcctcagcctcccgagtagctgggactacaggtgcgtgccaccacgcaccgctaatttttgcatttttaggagagacggggttccaccatgttggccaggatgggactatgagatttttgaggcaggactgagtctgattaacctctgggactcaatgcaaccctccaaggatcctgcccataggaggaggtatcagcaactcaggtctggtaagtgatgaggacacccaacccttccagggagcagagcgtggagcaaacatcagagatcctctgatgttacccagaagtagtttctctgtctccctgggccaaagggaggatcatgcttcctctacagtctgggatatgtgagctaagagacaaatgctggttagtggatgtgagggtgaatggcaggcacactcccagcctggctatttgcatgacggccctacccttactattgtatattctacagctaggttggtcctgcagcaatctcgttttgataagcagggtaaaagtgaaagaccaaaacgtgtcttctctctgagcctctgcacacagggtggttatgccgcagagtcaactgatgctaaagggaaactatgcaagccagaaatgattttaattttgcttccacaccatcctctcaaaaataacagaaagtgagcattttttttttttctggagtctctctctgtcacccaggctggagtacagtgacatgagctcagctcactgcagcctccacctcccgggttcaagcgattctcctgcctcagcctctggagtaactgagattacaggcacccaccaccacacctggctactttttgtatttttagtagagacagggtt[133 bp omitted]accaatgataaatgtgacctgataagataattcaagtattccatgttcctacacttcatagttaagtgtagcttcaacatttatctggtggaaaaatgaatcaaccaactttccacacatgagtgttttactcttcattttcctttctatcaagaaacattatgtgccctgagaaattataaatttcataattatttgggacgaaaattgtttgcactttttttgtggggcggggggatggagtttcgctcttgtcacccaggctggagtgcaatggtgcgatctcagctcactgcaaactccacctcctgggttcaagtgattctcctgcctcagtctcctgagtctatgggattactcatatgtaatcccatatatgagtgatatgggtgcgtatcagtatgcccagctaatttttgtatttttagtagatatggg[147 bp omitted]ccttcatactttcttttgattttatttttactgtatttacttttagtttttgaatacttcaaattcttgacaatcatttgacaggtttaaatttgagataaccaaaaagttaatagttctctcaaaactctcacgttgtactcttatttacttattttactttaagttctgggatatatgtgcagaacgtgcaggtttgttacataggtatacatgtgccatggtggtttgctgcacctatcaacctgttatctaggtttaagccccgcattaggtatttgtcctaatgttctccctccccttcccctacccccagacaggccctggtgtgtgttgttcccttccctgtgtccatgtgttctcattgttcaactcccactgatgagtgagaacatgtggtgtttggttttctgtccctgt[137 bp omitted]cctccaccccctgggttcaggcaattctcctgcgtcagcctcctgagtatctgggattacaggcacctgccaccacacccggctaatttttgtattttttttttagtagagacggggtttcaccatgttggccaggctggtcttgaacacctgaccttatgatccacccgcctcggcctcccgaaatgctgggattccaggcgtgagccaccgagcccggcccagtcttaacattttttaaggcttagtcacctgcatgataccaaccaggctggtctcaactgtggggcaactggggttgttgaaccacgtgaactgcaggtgctccctgcagaacccttgcatagccggcgtctttatacctgtctgtccatccagggatggcggggttggtgtttgtcctccagtcgagggcactgacaaccttggggcagcagcaccaatcagcttccatcccatcacgtaagagccacacgtggagatctgggtgcacacgcatctcacgtgtttcccggaacagcctcagcgcctttccccgagcagccccttggacattcacctggcagaggagtctctggttctgtttctggactgtggacgcgggctagggcgcatgctgcaggtgaatcacttctgaggacagatgagtctcctgttctgcttcgggtcaccacgctgctctgtgatccagggagtctctgtcagcgtctcttctgctggatccagtctggagtgtcagggattcagagcacgacagaggtgaccatgggcaacgtgcacccgagcacttccctgccacagggacatgcagagcatttcccaccctgaggagcggccactcaagaccatcaggtcgcaggtggaggactgtgatgcagccgagctcctatcaccaccaggacttgtctcactgagcagaagccggtaacacaccagggaagacggccttgcccacggggtggctgttgacggaatctttctgttctgcgttctctcatcatggatgtgggtccctttgatgcctctgtcttcgctcagggccccaggaagattcattccccctagactctctgcttcctgggaaatgattacattctgagctttggcgaattcccgcagcaccgctccttggctccctcactgctacctggacaggcagaaacattaacatccccggccagcacctaggccccgaagtgaggggatacatgagccgtgtgcaggcttccagtccctggaatgtgtgtagggggttcactgtccaccacagcttaaacacaaaatgaacattttgactggaaaagggtagatagaaagaaaaagacctaaatgtggagcgtagtctggagccttctatggggcagaacagcactcgtgtgcaataatgctgcagtgagccacagcctcgcctctcagctgcacaggacagatgtgcagtggaacgggaagtcagaatgaccatccctgcggccgttatgaggagctgttccctaggtctctacaatgaaagctcctgaaaacagtcaatgtagatttgcacgctgagaacagcacctccattcccagctacccagagccaggtcctaattcttgcttatccaccaactcagtaaatataagtcacgaaggttgcttttattttatgttgaactttttgtagtttactagcttgcattattttttttaaaaaagaaa[223 bp omitted]gaggcagaagaatggcgtgaacctggaaggcagagcttgcagtgagccgagatcacgccactgcactccagcctgggtgacagagcgagactccgtctcaaaaaaaaaaaaaaaaaaaaaaaaaaaaaaaaatatatatatatatataaaatcatgatttctccatttttttcctttcccattctctgacttagaatatttgagcaacaaaaccataatttccggtgcaagaatgacgaagttcctaatttgagtctgcttagatacctgagcttagtctcaggcccaccatgcgctgtgaactcatcccaggttacatgatgtgcctcttggcaactctgagtgatgctaagtttcagggaagtgtgcacagatctaggacttcagtaatgtttaatca[138 bp omitted]gcctcagcctcccgagtagctgggactacaggcgcccgccaccacgcccggctaattttttgtatttttttagtagagatggggtttcaccgtgttagccaagatggtctcaatctcctgacctcatgatccgcccgcctcggcctcccaaagtgctgggatcacaggcgtgagccaccagatttgggaacattttgtaatggcagtgtgtcctcaaataccttgcttacagtgagttatatttttagaaattacagtgcccattacacacacacagctgttccttctctgtactcacgggaaacccacagagacccctccacaaacacctccgtatctgcatgaaagtgtaaaaccacatgaaagccgagcttgctatttactagttgtgcatagggttgtttgtgtgcatgtgtgtgtgtgtgtgtgtcttctagatacagtcaggttcaacggcattatgctaaatacttgccgctctaatgaataatcatcctcttggggtttctccaggtcatttgaatatggagacccacttctccagtatctctcctaagaataacctttcaacaggttcttaacatcgtcagcaaaaatattttcaacaaatgttcccaaaagcaccttagactctgaagacctaaaaaagatataatacattctttcagagctgttggggagatcctcagcaaacctacattataccataaacggtctcaaaaatagctcattttcccataagccatgagagataatgagatgggaagtccggaggagggtctgaggtgtctgtgaggagccgcctcctccagtttcaggtcattgttccctccatgtgtgtctaggaagccctccctcctgacccccaaggaccctgcgtggactgaccctccagtgcagctctgatgtcggctaccacagattcgctgtgtactaggagggggcacgtgacttcctccagcgccctggccagcagcccgaggctgggctctcccaggccaacttccccctgggccctgtgagccgctcccaagggggccaatacagatgctacgtatggtgcacacaacctctcctccgagtgctcggcccccagggaccccctggacatcctgatcgcaggttggagcccagtgggttcagacaagttccaaaattctgtgcagagctgcgtgtgcgtttgtaggggtgtttctgtgtgtgcttgtgtgtgtgtgtttgtatgtgtttgggtgtgtatatgtatgcatgtttgtatttttgtgtctgtgtatatttgtgtgtttttgtctgtacgtgtttgaatttgtgtgtttttgtttctctctctgtagttgcatttgcatgcatctgtgtgtatgtggggaggtgtgtgtgtgtgtgtaggtgtgtgtgtgtgagtttgagtgtgtttctgtgtgggtttatttgtatgtgtatgagtgtgtgtgagtatatgtatgtgtgtgtgtgttgtgtgtgcgtgtgtgtatgtgagtgtgtgagattgtatgtgtgtgcatgttgtgtgtgtctgagattgtgtgtgcgtgtgtgcatgtgagattgtatgagtgtttgcatggtgtgtgtgcgtgtgtgtgtgagattgtgtgtgagtgcgcatgtgtgtatgtgagtgtgtgagattgtatgtgtgtgcatgttgtgtgtgtgtatgtgagtgtgtgtgagattgtatgagtgtgcgtgtgtgtgtgcatgcatgtgtgtagacggcatagcacagatggtcacgaggtgcgcctggttcttccgccatgtcaccgtgttgttggggaaacgctgagttgagggctctccgacagccaggagcagcatctgagattctgtaaaaccctgcccacccgctctctgcacagggccaggcagcctgggctgtggcagggccaagactcttggatacacccccagactgcctggaaaaatgatgtccactggcgggaagagacagacaaggctgactccgcctcatcctgggtgctagtgacgtagcgccctgcagctttagccttttaaaggacattctggtcctgtggaggacgggacggccctacgcaggaccacggaccctctgctgtcccctcaccgcagacctgcaccctgtccctcagagtcaggacgtgggtgggcgggcatctctcagtagagcctgagctgcggacgtggacacagcagagtcaggagcatcatcaaactgacgaccagaatgagtgaccgaggcaaaagtctcaatcaatggaggattattattgttattgttattattattattattattagagacggagttttgctgttgttgcccaggctggagtgtaacagcacgatctcagctcactgcaacctccgcctcccgggttcaagcgattctcctgcctcagcctcccgggtagctgggattacaggcatgcgccaccacgcccggctaattttgtattttagtagaaacggggtttc[131 bp omitted]aaggcacagccgggaaaaacgcaagccacagacacatctgtgtctcctttttccaaagaggctctccgaagatttattctttactcatttccttaaagaaagacaggcacagaggccgaggggcaggtaggtggtgaggtgaatggttccagttactgcccagtaaatctaccttttacctaagataaggtgcatgcttgaagagaaaaggggagtaaaggaaaaatcaattacgcagacgtctctgggtaggtggaagaatggctgatctcatcttgtctttgctctgtgcctgggaagataagcttgtaacggacattatcagtgtggaataaaacagacctgagttttagctagacttagattgcagacctggaggccagcaaggaatttccttatgaatgatgtgtgagggcctcggtggatgcccggagcctcttcccgtgggggatctggctgatgccaaatgccagcaaccgctgtccaactggaagagggtgccgctgactcagcctccaggctgacctccccttttacattaggaatttgggagtcctgaggttttgttctatttttcctttacaaaatgtttggccggatgcagtggctcacgcctgtaatctcagcactttgggaggtcaaggcgggtggatcacgtgagatcaggagttcaagaccagcctggccaacatggcaaaaccccatccctactaaaaatacaaaaattagttaggtgcggtggctcatgcctgtaatcccagcactttgggaggtgaggcgggcggatcacctggggtcaggagttcaagaccagcctggccaacatagtgaaaccctgtccctactaaaaatacaaaaatcagtcaggcacggtggctcacgcctgtatgcccagcactttgggaggctgaggagggaggatcacctgaggtcaggagttcaagaccagcctggccaacaaggtgaaaccccatctctactaaaaatacaaaaattagctgggcctgttggcaggcacttgtaatcccagctactcgggaggctgaggcaggagaatcgcttgaacctgagaggtgggggttgcagtgacccgagattgtgccaatgcactccagcctgggtagcggaacaagagtctgtctcagataaaaaacaaaacaaaaaacaaaacaaaacaaaaaaacccaaaacgttatgcgcacccattatcccgaatcttcttagcggatcctcacggcacaccttagaggtggggagcaacccagcttttaaagttgagatcattgagcctccacccaccgaggttggactcccagactcagcgttctgtgaagggttgtggttacgattccagcgctgccatgcacctggctccaaagcctgcacggccacagctgcaacgttcccctgccctggccatgtttatagacagcgctccaggtgaagagcgcctatagccagggcagaacccctatcggggcagaggcactgtcgctccatcagagttcaccagcagcagcaccatggacgcactctcattgctgaagtccagccgtgttcgtgggcagacgcttctcagcttgtgtgagccctgggcttcctgaggtggttgttttggagcatttcgtccagcttctcccttgttcctggggaatggtttgccccatgccccagctctgtcgttccggaagtttctacttcacacagttaaaaaaaaattctctaaatatataaacaccatgacccaatttttctggcaaaaacaaacaagcaaacacacccacaaacatctttccagacacgtaagcaaaatctgcaattacacgctcttcacgtgtttaggcactataaccttcttcatttccggcaggtccttggtcctgtgtttctctagggggtgtctttccagcagcctctccttatgatgtcctgggattcctgtatccacttctctttcaataaccttgtaactcagcttgggaatcagagtggtcactttaatgtctaacatgcattttttttttaatttttgaaaaggtttaatcacaagttaaagagtcgcttagtcaaatacataattatattgtagatccatccatcccctcctggcagataatttagctcaactaaattgtaccaataaatccatctacaggtctcatggaacttagctggaaaacaggaaaaaccatggaatccgacaatgtcaaatatggcagactttgtgaatcgactcattgacttatctatctgcctacctatttacctgtattcctatggatctgttcatcagttaatctctctatctgaaggagccacagggaatgccaacagccacccagagctggaaagggcaagggagggttctccccaagagcctccagagagaacgctggccctggccctgccatcaccttgatttttagcttcgcaactctgagagaataaatttatgttgtcttaagccacccaataataatttgttatgacagcctagaaaactaattgctcatctcccccaacccccatcccctctctctctgaattcatacttatgtagtgtatgtgtgtttctatacacacatgtgccatgaattttgtttgtttgtttgagagacagaaggaactgagttttgagtcatagctaaagtgtggtttcagataaaacaccaccagctggtatttgcatgccctattctcttctagaaatgccgaagtttctagttaactggttttatttgtcaggagaagtaagggaattgcaaatattcagcctactaacattaggtggaggacacatttcctttttattctgcaaagaggatcatgatggtaacaatatttatgtattagtttgacaagagaacattgcattaggagatatacctaatgttaaacgacgagttagtgggtgcagcacaccaacatggcacatgtatacatatgtaacaaacctgcacgttgtgcacatgtaccctaaaacttaaagtatgtattacaaaaaagcgcctcctaattattccttggcctatttcttcttggtgttttaaatttaattatactctagtaatttatatttaagctaagaagtagtctactggtgttgaaaacagatgtatatagagagattcttttttgatctataagataattttgtaaactatttttatagccagaattttcatatattggtctttactaatcctgtcgaattccaatggtgtaggtaattttttggtgcagctgcagaagaagactttgcaagaaatttgcttgactttagcaagtacaagtggactaaattgcttcttttgtcctggaaagttcagaactatttgggcatttctgattctcagattcttccatccacacatttcatcctatgcgacaaggttttacatacctcccaagaaacttattttgacatagaaatattcaactattttgtgctataactcaagttatcttgctgctggtgaaaagatgtgggtgcaaaaatattttgaatttattatgctacaaataatatgtgatattaatgcacttataaattaatttgttagagtaactttgtatattgtaaatagaataccactcagaaaatgctacacaacacattaaacaaacagcatgatttagtacaaatgaatctgggaatagtctttcaaatgaatcacaatcaagaatcctacattgagtacaacacactgcttttaactggtgcttcatattctttttgtttccaatgaagttgaatacatttggttgtcttaattaaaagcttaagtgtattttgttctaacttatatttaatggattaattttagttaattgattttatgaagacacttgaaaggtgaactgaagtgtgtggtgcagatataaagctagttaagtcattggaaacattaacttggcttttattgttatttctcagcctggaattctctgaagcatctgataatattgaccctctgaactgcttgatcattactctttttttttttttttgaggcggagtctcgctttgtcagagtgcagtggtgtgatctcagctcactgcaacctccacctcccaggttcaagcagttctctgcctcagcctcctgagtagctgggattacagggacctgccaccatgcctggctaatttttgtatttttagcagagatggggtttcactgtcttggccag[132 bp omitted]gatggtctatattattatacatttttcatttttcttctatttctatctcaagatttcttcgggaagcttgccgttaatgttcttttttttaaaaaaaaacatatgctccacctttgagacagtattgccgattgaacttcactttactaagaaattcttcaccaaaagctcatctataaaactgcccagtgggagtttagcactttttctgatttatgaacattgccaactcggtagtgccaagagatttcaaaattttcaccctagaataccaaggtcaggacatctctcctacttgcaggaaagatgagctgaactggacctgatctagccttgaacagagatatgcatgagaatctagagggttttccctgagaccatggaccagcaacttctcccttactgcctctcactttgtatggggatcctcagactgtaacaatgaattcagcactgggtcttggatagttccaccctgggatgcccagatctaaatttagccaattggcctgtgaatgtgacataaaatacggtatttatggctgggcacagtggctcacgcctgtgatctcagcactttgagaagctgaggcgggtggatcacttgaggtcaggagtttgagaccagcctggccaacatggccaaacctgatctctactaaaaatacaaaatttagctgggcatggtgacatgcgcctgtagtcccagctacttgggaggctgaggcaggagaaaggcatgaacccgggaggcggagcttgcagtgagccaagatcgcactattgcactcattacagcctgggtggcagagcaagaatctgtcaaaaacaaaacaaaacaaaacaaaacaaaacaaaacaaaaaacaagtcttttacaagttcgaagctatttcttatggagttgttatttgtaaaaccatgactgtaacccacctgacttggatcaaagagaaacggaatcaatcccaaggcgtcccctcaatagggcactgggcagctgtggatgtcatggggaagttctcctgacggatgaccctccaggacacatagctatgtggggagttagaaaagaaaaagacaacactcaggacattattagtcattagctttctttgagaaagagccagagagaactagtatattgctatgcttttctgtgtgtgtgtttgtattttacattttaaaaatgaaagaatacatgaaaacctttaaaactgggtacactcagctacttgggaggctgaggcagaagaatggcttaaacccaggaggcggaggttgcattgagctgagatcgtgccattgcactccagcctgggtgacagagcgagactccgtttcaacaaaaataaaaacaaaatcaaaacgacaacaaaaaccacaacaaaaccctaggtacttgtgacggagggagaaaacagcagaggagatgggatgaagctagactaacctcattgtgctttgtttgttgtttcagtttggaaatagacatatattttcttgaataggtgtagtgccaaaatattttcacatacgatttatgaacctaaagacaaaacctaagtaaaaagagtaatgaaactaatcttaacaccaaattaagattttactaaacaaaggtgaattatttccactgaattttaagcaaaattatttaactatgttttataagtaatacatattatacatcattttatattatagatttttaatgttttaaaataatcaaatatgatatataatatattgatttataattattactgtaataaagaattttgacgattgcatatacctcattttatattataattttttaaaatttttaaataatcaaataatatatatgattattataataaataattttgacgatgtatagtaaatacatatatcatcgaaaatatttaatcttaaaatatacttagatagtgaaatgttttttatttctgtttgaggaaataggtgagtccacattaagacagaatgcatgaaatgaactcagaaccccttattatacaagagaacaaaggagtcacaattaccttcaaattcatttgacttaaacagaaaggcaatcatgaaggatcccactgacaaagaatggaatatttatagcatcaaataatatttcaatggattgaaataaatgaatatatataaaccatatatgtttactagtgctaaaacaaaagaaaataagccaaacaaacaaaatacctcatttacagcaccaaattaccacattccaaaagtggaaatggacgcaagaaccagtatctcccttttctatctgaagtattccacaggaaacattcttttctctgtagaagatttctgcagaaaatttcagaccatttttagtctgaataatctgcataatctgaataatctacagattattctgtgggaataattcatctttgtttagtgaaaccttaacttggtataagattagtttattttttacctaggttttgtctttgggtttatgaattatatgtgaattttttttttttttttttttttttttttttttttgggacggagtctcactctgtcccccagactggagtgcaatggcgccatctcggctcactgcaacctctgcctcccgggttcccgccattctcctgcctcagcctcccgagaagctggaactacaggcgcctgccac[131 bp omitted]caccgcgcccggccgaaaatatttttgcactgcacgtatattcatgaaaatatgtgtatacttccaaagtgaaacaggacatagtttccaaactggaagatggacagagttgcaaaatctgtacactgagtgtacaagcaataaacatcaatggcctcccaaacccttagacttcaggttcgtggtgaatgtagtactggatggatcctgttgatgacaaagccatgggggcaggaatgcaagctggagaatgcaagacgcaaacaaatgagtcacttactgtgtcagatctaattttttaaaaaaacttttgtgttatcttgccctcagattcatattttcaaaatctttaatttttgtttaaaaaattaccgctaaaaccaaggcaggaggagtggaattccaagacggtggattacgtgattctgttcctcatagccccacagaaacatcagctgtgaccgccatccaggaccagaaatatttctgtgacaacctagaagtgcagtgagagttgccagcaccacaacgagcaaaaaattgcagaataagatacaagaaatagttacaaaattaggtaatagtatagcagaatgctataatcaagctttattcactagccctgtttcacttttttattactcaaaacgtctagactcattggagacagggagagttatgttgatctgcaatatattcccagtgtcttgcatttatttttatttttttattttttctttttttattttattattattatactttaagttttagggtacttgtgcacaacgtgcaggtttgtttttgaaatggcataaagcaatatatttgaaaattaaaaaaaagatttttgaagaaaagagaaagaacagcttttctcttctttctgcatctcttcttccccagggaggcacagttcagtgccaggagagactccgcgggctgcgagctctcccacagaggaaagtgaaagcagagggaacacccaggttcctcagcctcaggggaaactgcccacgtcagcctctcagcaccagatcgtcgaggggactggaatggcggaatagtcttggaggaggcgggagcaccggaagctgtgagcgctcacagcagccatcacgcagatctaacaaaatggctgcagatctgacccacagactcatgggagccgaatagacatctttccaaagacacaggaatggacggcaggtttagaaaaaggctccacatacctaatcatgaggaaaacgcattaaaatcacagtgaggcatcacctctctggttaggatgataacaaaggcaaacgaaggtaagtgcttcgaagggcgtgaagaaaaaggaaccctggaataccattaataaaaatgcagattggtgcagccattttgaaaaacgcatagagattcctcaaaaaattaaaatggaactacacgacacagcatttctctgctggatacttcgccagagcaattgaaatcaaaatactgaggaggtgttgcacgcctatatttattgcaccattattcacagtagccaagatacgaaaacaacataaatgttcatcgatggatgaatggatagagaaaatgtgatatatacctatcataaaatattattcagcatttttttaagcattaacaaatttacttaattatttgaggcaaggtcttgctctgtctcctagactggagcccagtggtgtgatcacagctcactgcagcctcaacctcccaagctcagtcaatccttccacctcagcctcttgggtagctgggactacaggcgtgcaccaccacgcctggctaaccttctgtatccttggtagagatgggggtctcgctgtgttgcccaggctggtcttgaactccttgcctcaggtgatccctccgcctcagcctcccaaactgctgggatcacaggcgtgagccactgtgcctggccaaggggtacaacgttttaattctccaagatgaataaattatcgatatctaatgtatagaatgaaaactattggtaagagtactgtactatacgcttgaaatttgctaaaatagtagattctaagtagttttaccacacacacaagtgaggtgatggattgtggtgattatttcactatatatataaagtcgtcaaggtatacatctttaatatgtgccttaaaaatactcaaagtggaaaaacaaaatgagtctgttatttaggtgagacctacgagcactgcctcctgagctcagtgatggacaaacctgtgatatattaagggtcactatctcttctactatttttactatttttcaatattaaaaagcacccctttttactattacagttatataattagcagcacatggaaattgttcagaaacaagatcgcaaccctgaaattcaccatattttaatttttaatttgttgttgttgttgagatggagtttctctcttgttgccctggctggagtgcaatggtgcaatgtcggctcactgcaacttccaccttctgggttcaagtgattctcttgcctcagctttctgagtagctgggcttacagacatgtgtcaccatgcccggctaattttgaatttttagtagagacggagtttcaccatgtcggtcaggctggtcttgaactcctgacctcaggtgatccgcccaccatggcctcccaaagtgatgggattacaggcatgagccacagtgcctcacccatttctaaaatataatatatctctagtaaatccaactaagaattgaaaaaaaatgtttaaacatgaatgtatattttggcaatcaaaatattacctttgtaacatttggacacaattctgtttcatagttgcttaataaactgctacatagaatacaacagatatttattaatatttatgagttgtgcaaatacatacaacactgggtaaaaaataatttgtaaattcttctttgtagaggcagtattgtatttgcaattttgatgaaaaaatggcttaagaaaatgtatgtaattgtaca[131 bp omitted]ttctcctgcctc[225 bp omitted]gacctgacaaaatgcaataaaccactatactgcgtgaagtgagtcaatatcttaaataatttgaccaacaaaatatgtgtgcatcaacaatgtattttacaaccaaatactaacattcccaaatgtcctgtactggtcaaaaaaaaaaaaagacacagaaagaaaattaattataatattaaaaatagttttatctaatattttaaaattacagataaaaattggttatagtaaaccaaagaaaaaaacagtctacaaaataatgtgaagtatttgataggtagatatgtaaagaaatagatgcagatcagagatagaaattttgtttgatctttgaattccaaagattagagaccaggagaattataggtataaaaaaattaagaacttagtatttgagtaaaagttaattccaaaatgagttggaagaatatttgttaaatacatggatttaaatattttgacatttagtttaaaaactaaaaccagtttctactggatgccatttaggcaaataaaaatatttatgtaaaggcatataaccatataaattaatatctagtagattaagcatatagaaacaggtatatatattttaaaacatgagttgaggcaaatacttagtaagcaattttaaaacatgagccatagaacaattaaaaatattacaatatttcaaatagtaaaacttatttaagactaacgacatataatatggaactcagaatattagaaatattttatatatcaaaattgaaaaaaggaggctgtcattaatattttaagtgctcattctaaacagtaaaataaaatatcatttgttatctaagtagggaaattatgtaaacaaggatttctgtgggtaagaaaaaaagcctcacaaatatatgtttttctcggagattatcaaccaaatgcaaaataaaatttaaaaaagatttctttaaatttgaaatccatttttttgttacatgtttaatttatggtcatagcgtcactgtacataattactattcttcttttttttttttttttgatggcgtcttgctctgtcacccaggctggagtgcagtggcacaatcttggctcactgcaacctctgcctcctgggtttaagcgaatctcctgcctcagcctcatgagtagctgggattacaggtacccaccatcatgcttggctaatttttgcatttttgtagagaaggggttttaccatgttggccaggctggtcttgaattcctgacctcagatgattaacccgccttggcctcccaaagtgctgggattacaagcatgagctaccgtgcctggcccataattactattcttcttgcagctatggatttttatatctgggtgaaaattaaatgaagagtaatggtttctcagtttgaaatgaatgaatgtgagatgcgagtgaaaccttatatgatactatgaagtagaagatagagtattttagccatatttaacttgacatactattttataatacctaaaaatgtagatgcattgcaaaaacattaggacttaccaaaacaagaacagcatttttataataattttttaactggtttaataattaaaacgttgttaagctacaatgggatttaactgtcattaaaatttggaaaatactagaatcttggtaaagtgtagattagtttagagaaatagatgctttagaaaatcaaaaccgtttctggaaggctatataataatgataacagtttggtcccagtggacagggagaaaagtaggagagtgagaaataaaaccatgcattttatgtagcatatacacacaaacttattcaaaattttcttggaaagaaaatgtcttgtgacaagtatgagaaatttagcaaatttatagtagacattggtcagcaaatccaaacaagagaaagaaaggagctatgcacgaatcataaaggaaacatacaactaaatttaaattccactaaacttagttgagcagcagtgagaacaacaaaatgatggaaaatcatggacacaagaaaatatctgtgagtcctagaccagctgggactatgggtctcatctgctctttaagaatggcagtcattcgtggggaaatgaaaacctctgtttcatctcttatcaaagtgatttgcagagaggcacaatagtaggctaaatgaggcacatcttacttcctgagatcctggcaggaaaatccccaccccacggctcttctggctgggatcttagctgtcagaacagactaagtgctcactgttttaagactgagtggagtgacagctttagaacgcttgatctttaaattccaacggatctggaccaggtgcaaaggtttggggtgtagcacagcacttttaaagctggctaagagtcagagatgcatttatacctgaacacatttatagtccctgattatccctgctccctaagccttgaaaacagtcactcactttaaaaggtgagattctatttggtgaagtgagagatagagtttaccttctttacactggttccaggattttctacggacatgaaattattgttgcagttaagtgcatggtaatccccagaacccatgggaaagagatggaggtgtatggctttgcacttatgacagaaagtttccggagacatatgccattgccaaccaaagcacaacacgcaaccaccacaggtaattttaaatctcctaagttgcaggtgtcattagacaggaagtgtgtaagcaggtggcaagagctgacacactcttaaccctcatacaagcagcagagtgaagactgtgaggcttggcgtgttcattcagagacagtgtttcggatggggctatgacagaagaggaaaataagagatgccaggcaactcttgagcgggaaggctggggcaattctatgtctcaggaaccctcagaaaatattattactttaagggtttttttttaatggtccatgctgatgctaggactaaacaataattttgtgtacacaccaagttttttatgataaacactctaattccctgagaatatggctctgtatcaaagaaaattcctcttaccaaatgccatttcttgctgaagaagtagccttcatggtcacagtctgggcacctgtgcaaaaggggacatcttatccctgatataaaggtttgggacaccatgaggtcatcttcttgctgacaggtaattattatatcatctgtgagtacactgacagtatttgcatggggatttgagatgctctcagaaaaacatttttgaaatgttcaaatgactgagagctaatagtagtgattagatccattcaactgagaaaaagagagcaagagacagaaacagagatagaaagagatagagagaaagagagacagaaaaaagataaagacagtatgacagaaacagagagagagagagaaagagaaaggaaggaaggaaggaagaaaaagaaagaaagagaaagaaagaaaaagagaaagaaagaaagaaagaaagaaagaaagaaagaaagaaagaaagaaagaaagaaagaaacatctctgaaattcttggagaaaccacatggaaataagatatcagatgaggaccctgatgtctaagaactgagatgaaggaggaggcaatgagtctggatgtgtttcttcccaaccttggggtcttgcctcctgaatgttattctttttctattctgagaactttgtacaaaaggctgcctggaagggagaagaaaagaatcaagttggaacaaattgtctctgtgatagaaatgaacttggcaggagtggagaaacttttattccctgtttccataggcacatgtgaagtatctgatctgtgtcaaacatggtgtatgagatgtctcagaataaaggacatgaaaacttccaaagagcctgcctgtattaagtcaatattgtagtcaagaaaagtggacattacacacaataaataatagatagagtatgcattgtgttaaaagataataagtgcattgtgagaaggaaaagaagtaatgtgctccacagaatagtaaaaaattttgcaagcaggttgtttggctgactggagctgaaactcttccccaagtcttcaggctgtttgtcctgcagattttggactcaccaagtgccaacaattacatgaacccattcctagatagcaagataagtagatatagatatgcacatatgtacatatatcggttctgtttctctggagaacacttacaaatacataatttgatcataggaatgattctagatgaactgaatcttaatatgttttgtctactgtttctgaggtttatggaactggctgtctgattagatttaaagacattaagacagtatgacagaaacagaaagagaaagaaagagaaaggaagaaaggaaggaaggaagaaggaaggaaggaagtctgtgatagtccgtggcatgatgtggcattaggggtacaccactagatgctcctaatcctacacttataaggaacgagaatctgggtggccttgcatacacctttgaagattgttgtcaaactattaagtatagtatgtgtggctgttttgtcattggataaagaggtaaagaaaaagatgagcccagagattagaatttccagttcaagcaccactacataaatatctgaggtttctatgtgtgccctgaaagagactcttatcatctgtagctgtaggggtgagattgctgaaaatcaaaccgagaatctcatccttgaagtggctgtattacaattcaagcggagtccccagcctcacagggtatctactgttcaagtaatgccattggtcaggaatgggtgagatcttgaaagatggaatgaggatgtatattaagaccctgatacagctgaggatatcaagcccctaactttgaatgagtcttctttgccaatagaagcatcctctctatctgcaagggaggagattaaccctgtactgtctgaggaaacaatactggcctcccctgaggcagttgccatgcaaggctatgctgattctccttaggatacatcctgaccaaccctctttgcttctagacctataactagattcaagtctcgcaggccctgaaaagtgtgttacaaagtgtggctcatgagaagttgtgctacactccaaagtaatttatttatttttctaatttatccatacagaagtctgaggaacacgtgtcagagtggatattaagggtttaggataatggtgaaaagaacataaagttgagtcggaccgaatttatatatataagctcactaaacagagattgcacatttaatgttgcatcttggagaaccggaaatgattctaccagtttgtctggttgattggctgaaacatggagcaaaagctggcctgcagtaaataaactcaaaatgccagacatgccttggtttgctgcagaggaattaacttaaaggcttaggaagactgtaatgttaccatgcatgtatcaaacctagtaacccacattggaagcatcagaagatgtatctttcaacaatattgcaaagggagctctggcatccttgaggagctctgtgatttctcttctctggaagctggaacctacagtggaactgctgaattttaaaaaatctaaatgtaatgggagtaatttggcccctacctcttggcccccagagagacaggggccaagtagaggaactcagccaccaaaggcaaggtgggtttggttaccatgatggacagcaaagtcaaaccagcgatcggaatagtcccgcagacttatggtgttggctagttgatcacggcattctaacaagggagatagataggaaacctactaaattctcacttgatctgtataagcagaaaatttctatgtcaagtgaacaaaagtcaacccaaatcataaaagcagagagccacagtctctcaatcaatggctagcactgagtcagttcatagagccagaatcccctgaattaaagggatcccaggcagggttcccgtgagggcactgtccctggtacactaccaagaatatatactcttaatctttctcctggactttggttaaagggacctgcagccttttacaatggcaatggagccttggggaaaataatcagataatttgggcattactggaaatggggtatgaactgacattaattccaggagacccgaaacgtcactgtggccctccagtcagagtagtggctgctagaggcaaggtgattggtggagtttgagctcacgtgttccatagtgaatccagtgtatccctaaacccaccctgtggctgtatccccagttccagagggcaacattggaatagacatattcaacaactatcacaacccccacagtggttccctcacttgttgagtgagggttattagagtgggcccagtgggagccactagaactgcctcttcccagctaaactgtaaaccaaaagcagtcttgcattcctggaggaattccatatattgggacttgaagcgtgcagagacagtgattcccacaaccttgccattcacctctcctattttacctccacagaagacgcagggatcttggataatgatattagattattgtaagcttaatcagatccaattgaagatgttgtaacagatgtggttttgtagtttgagcaaattaatacatcccctgatacccagtattcagccattgatgtgttaaatatttttttctccatcactgttaataagaaccatcaggaacagtttcctttcatttggcaagggcatcagtacaccttcacagtcctacctcagggtctgggaaagcacctgggggttgtgatcggggtctcagtggccttcagctggtgctcttcctcctcttctttctcctctgacactggcctcagggccaacacaggacattgggtgagtaggaagttggcggggagacccatgggctgactgaaggtggggtcagggcaccaccaaccagacagattccagatgggaaagttcagctcagaaaaacggctccagcatttcccagtgagaaaacctagaaagaagagaataaatgtgaacatacatgaacataccttattcttttggttgtttcatctaacgacgtttttaaaacatctatgcaagtgtgttttcagctttccttcttttctcttgagttctctgtgcagggcaggtggctctcatgatcccaaggctgaagctctgtccctcttcacccagcccagagggaggctgatttccaaagtcctgtggggactgtggagtcagagaacgacagaggcctgtggaggaggtaattctgcccgaagaccccagacgcccacctacccccacaacctcctcactggccctcacactcccatgtccttccccgggtccagcccagctgctgatgtccaggaagaaaacttctgtgacaggaagaggggggcacctgagggtggagacagaagccccaaagtttcggtagcaatgatagcaggggaaaaggctgagaagggcttgggactcttttatataatatataaattaatataaaaattaattcaccttcacaatgtctgtctaatgcatttcaacaactgtctgtgttttcctcatgtatcttggttgtcattcctgtggggcggctcctcccacgcacctgacctttcataaagggtttctcccacggctgtccaggcatcagcctgatgaaggggattgttgccgctgctcctccccactcccccaaactcagtgtcagctcaagattgtgcccagcagggatgggaccaacgccagtctcacactcacctgtggggcagagcagacgcccatgtcagaccaccgtggattgaatctgtttctcacacacaggggaggggctgagcactgaccatggcctccagtgagtgagcagagaccccccagcgcctgtccacacacacaggggagggggagccacagcttccagcgtcacccagagccctgacccctccctgcctgggaggacgtggggttcctcttctgtcccacacggaggtgggagcctcctcctccctaatgaccctgggtggtcccagacacctgtggccactcagcattgaactctgctcatggaaggggatgcgtctcaatgtgaggaactgttcttcctctttctgtgcccgtggctgtgatgatctgcatatttcagatgtatcacaaggagaatttcatggtatttggagccgatgtgggctcttgagtgggggcgtcaatcatcctcctggactgtggagcccagcaccaggatcctctcccgtccccaccctcctgtctgaactggtctggaaattcaccatggctgagcctcccatgtcctgggcaccactgacccccacagccactgtgatgagtggggttcacgacagcaggctcagaggtgacattcatgtccaaagtcacataaaccctggatgataatcaggaattaaatacaaatcagctcaccttccccagaatcagattacagacctaacaaattcttctgaaaactctgaacatggacggaggtgccgagggaaggccaaggacgcaagggacactgagggggcgggaccgactcagagcctcattcccggggtgggggtgggtgatgttgcaacaaagagaaaaggggaagtacaggagagggacggtttggtaggaaggaaacacacactctcaagacagaacaaatatgttttattatagttaatccctgcatttccccttttgagacagggtctcactctgtcactgaggctggaatgctaaggggtgatcatagctccctgcagcctccgcctcccaggccgaagtattcctcccacctcagcctcctgagtagctgggactagagatgtgagctgccatgcctggctaattttttgctttttttatacagacaaggtcttgctatgtggcccagggtaatctgaagctcctggcctctagccttcacccacctcagcctcctgaagtgctgggattccaggcatgagccaccatggtagaccctgcattactcctctgtgctcactgccacacgcagctcaacctgagctacacagccaggtgtcaggtgcgtctctgctgatctgagtctaactgcagcatggacctgggttttccctgaagcatctccagggctggagggacgaccgccatggtaaggaccccgcaacgctgagctgatggacgggctgaaggagggagggagaccccatggggaagctctgagaaggaagaggaagcctctgctcaccctcatctggaagggcagacgcaggagggcaccagttctatttgctgctacatcccaggtctcaaggagatgaggataaaccagacagacagtggctggggggcaggaaagaccccattacagtctgaaatgtctgcagagggcctggtgcctgcccccacctcagccctaaaggtatgacagccaggctcctgagagggcagttgcacttcctgtgtggttgcacataacaaaaccccatgacaagaaggatccagcctccgagtgtccacaccctgtgcgtctctctgtcctgccagcactgagggctcatccatccgcagagcagggcagtgggaggagacgccatgacccccatcctcacggtcctgatctgtctcggtgagatttgaagagggaggggagcttctaacctaggagggacctcaccccacagccaaactctggtccctaaggagaccccaggggctcacaaagatcccagggaggggaggacctgcccaggcttcaggggaaaaatccctcacagggaactctcttccagggctgagtctgggccccaggacccacgtgcaggcaggtgagtctgttcccagctgtcccaggtccctcctcctcactagggacaaggggccacccccgtgcagctggggatggggaatagcagttctgggctgactgatgggggtgtctggagggtcctgcagctgagagctgagatctgttgggtgggaaatgacttagaatccgacctctgatttccttccagggcacctccccaagcccaccctctgggctgagccaggctctgtgatcatccagggaagtcctgtgaccctcaggtgtcaggggagccttcaggctgaggagtaccatctatatagggaaaacaaatcagcatcctgggttagacggatacaagagcctgggaagaatggccagttccccatcccatccatcacctgggaacacgcagggcggtatcactgtcagtactacagccacaatcactcatcagagtacagtgaccccctggagctggtggtgacaggtgagaggacactcaggagtcccagccccaggctctgccctcaggaagggggtcggctctcaggggcatctccgctctcacagctcaaccctggggatgatgtgggaggtgggagccccatttaacacagtgcctccttctctcctaggagcctacagcaaacccaccctctcagctctgcccagccctgtggtgacctcaggagggaacgtgaccctccagtgtgtctcacaggtggcatttgacggcttcattctgtgtaaggaaggagaagatgaacacccacaacgcctgaactcccattcccatgcccgtgggtggtcctgggccatcttctccgtgggccccgtgagcccgagtcgcaggtggtcgtacaggtgctatgcttatgactcgaactctccctatgtgtggtctctacccagtgatctcctggagctcctggtcccaggtgagaaattcacagaattgcttggagttccctgagtctccctgagtctccaggcaggtggggagcagccgcgtctcagggcagctccaggtgggatgatgttggggcgagagggctcagggctcctggggccggagacacaggaagatcagcgggggagagggagggtttgtggggaagcctgagggtcggctcctggaaaccatgaacaccttttcccaggtgtttctaagaagccatcactctcagtgcagccaggtcctatggtggcccctggggagagcctgaccctccagtgtgtctctgatgtcggctacgacagatttgttctgtataaggagggagaacgtgacttcctccagcgccctggttggcagccccaggctgggctctcccaggccaacttcaccctgggccctgtgagcccctcccacgggggccagtacagatgctacagtgcacacaacctctcctccgagtggtcggcccccagtgaccccctggacatcctgatcacaggtgaggagcccagcgggttcagtcagggacccaggctctgcacaggccctgccaggggagcccaggtggtgatggccggaatgagggttgggggtcccaagggagggagagacagagagagacaggggatgggcggggaggggagactcagagaaaacagagacagagagactaagggtcccagggagaggcctggggaggtctcagctcagaacaaggtggggcagcccctcacccatccttcttctctctaggacagttctatgacagaccctctctctcggtgcagccggtccccacagtagccccaggaaagaacgtgaccctgctgtgtcagtcacgggggcagttccacactttccttctgaccaaggagggggcaggccatcccccactgcatctgagatcagagcaccaagctcagcagaaccaggctgaattccgcatgggtcctgtgacctcagcccacgtggggacctacagatgctacagctcactcagctccaacccctacctgctgtctctccccagtgaccccctggagctcgtggtctcaggtgagggccctgatcttgtcctctccgagctcaaaggctcagctcaggccctgcccccagcagagctctgggacaataatgaatgaggggagtgaagcgggagggtccacaggggagggtccagcccatgggagagtggaaataggcagggacctcccacccctggctcccacccctgaagtctcagtaaagagcatgaagggctgggaggagacgggggcgggggggcgggtggtgaacctcagagatgtgattagactgagggtggaagacggagaccccacccgctcccctcctgatgtctccacctcagaatcagagcctctgggggtcccaaaccctatgtcctgaccccatgggtgacaaaaccagccactcccagctcaagagaagtttctagactcatctcaatgctacctccaatattcagggtctgatttccagggcagcagcggggagggtggacagtaagggtgtggtctgcgtggcttcctggggcttcagggatggggcaggtgttccctccgtggtgttcagaggggagggaggtgtctgaggttcagcattgatgagcggagcagagggatctttccccctccctgagcaggattcccaggagccgtcacctctcatgggggagccagggtcaggggagatcacagtcaggtacttggtctaggagtcaggtgggaggagcccggggaggtggggctgggtctgtgatggctcagcctctccttgggaggtggaacttctgaaagagcccattccccttgcaccctggactcctcatctgaataagggggagctgcctggatgtgactgccccaaagccccttcatttctgaccttctggggcatctgggatgtggctcatcctagacctgctcccgtctacagccctctctggccctctcctaattctcccaataactgagacttgttaagagttaaaaaaccaacggagatgggggcaggtgcatgcagttttacccatccctcctggaatctcagcttagtaagacaaagacacaatattttggaaaaaacaaaagtttacaaaaccccgctggttgagagtctcccctctctcgtgtacaagagaaaatgtctccaattttctaccaaaatcaatagctggcacagctctgcaggacccccagcccctggccttgtcctgcaggatgtgtgatgagtagaggaaggagaacaggctgggtggggaggatttggggtccaggcctgacttggacactgggaagatgctggggctgatggaggaggaagagaggcaggtgagttggagagaggacagatggacagtgtattggcagctctcatttctcatttccaagagcccctgagtataagcccttcacccacacctgcggggtccctgggccatctcaagacaagagaggaggctgcttgggcctcggtgggatctgactgtgatgaggctggagtccaccccagatgtgctcctttagagagaagcaccccagctgtgggtgccgctcacactgcccctcctgtgctcacctggaggcctctgtgctcagggcatccctgagaataaggaggggccctgcacctgctccctggacaagtcaggcaagtattcacagcacgtctttctgtttaactcatttctactctgcattttctgtatgcacttgtcctttgttactttttttctaaaacttttaaaacagtatttgaatatatgaatttataatatatgaacttaaaattgtatgcatatattatttaaaaatccttatttatactcccctttaattgagtcttgatttaatttatacattcaatgtagaaacaaatttctcattaatatcaactcttcctccttcacacattaaaaatgaagattttcttaatgaatttaagacatgttttgaaattttactcctaagaatattgtatgctcattttaacttaaagaattattcaacatctttaacaattgataagtgaggtatttgatttctttatatatatatatatattttattattatagtttaagttccagggtacatgtgcacaatgtgcaggtttgttacgtaggtatacaggtgccatgttggtttgctgcacccatcaactcgtcattcacattagtatttctcctaatgctatccttctcccagccccccacccctagactggccccggtgtgtgatgttccccgccctgtgtccatgtgttctcattgttcaactcccattatgagtgagaacatgcggtgtttggttttctgttcttgtgacagtttgctgagtgatggtttccaggttcatcaatgtccctgcaaaggacatgaactcatcctttttaacggctgcatagtattccatggtgtatatgtgccacattttcttaatgcagtccactgatggacatttgggttggttccaagtctttgctattgtgattagtgccacagtaaacatatgtgtgcatgtgtctttgtcgtagaatggtttataaccctttgggtatatgcccagtaatgggattgctgggtcaaatggtagttctagttgtagattcttgaggaatcgtcacactgtcttccacaatggttgaactaatttacactcccaccaacagtgtaaaagcgttcctatttttccacatcctctccagcatctgtagtttcctgactttttaatgattgccattctaactggcatgagatggtatctcactgctgttttgatgtgcatttctctgatgaccagtgatgataagcatttttgcatatgtctgttgcctgcataaatgtcttctcttgagaagtgtctgttcatatcctttgcccactttttgattttttttttttgtaaatgtgtttaagttctttatagattctggatattagcactttgccaaatgggtagattgcaaaaattttctcccattctgtaggctgcctgttcactctcatgatagtttcttttgctgtgcagaagctctttaattagatcccatttgtctattttggcttttggtgccattgcttgtggtgttttagtcatgaagtccttgcccatgcctatgtcctgaatggtattgcctaggttttcttctagggtttttatggtgttaggtcttacatttaagtctttaatccatcttgacttaattatcgtatagggtgtaaggaagggatccagtttcagctttctacatgtggctagccagtttttctagcaccatttattaaatagggaattctttccccatttcttgtttttgtcaagtttgtcaaagatcagatggttgtagatgtgtggttttatttttgagggctctgttctgttccattggtctatgcatctgttttggtaccagtaccatgctgctttggttactgtagccttgaagggtagtttgaagtcaggtagcgtgatgcctccaactttgttctttttgcttaggattgtcttggcaatgcgggcttttttttggttccatatgaactttaaagtagttttttccaattatgtgaagaaagtcagtggtagcttgatggggatagcattgaatctataaatccctttgggcagtgtggccattttcacaatattgattcttcctatccatgagcatggaatgttcttccatttgtctgtgttctcttttaattcattgagcagtggtttgtagttctctttgaagaggtccttcacatcctttgttagttggattcctaggtattttattctctttgtagtaattgcaaatgggagttcactcatgacttggctctctgtttgtctattattggtttataggaatgcttgtaatttttgcacattgattttgtatcctgagactttgctgaagttgcttatcagcttaaggagattttgggctgagtcaatggggttttaaatatataatcatgtcatctgcaagcagagataatttgactttctcttttcctaattgaatacactttatttctttctcttgcgtgattgccctagccagaacttccaacactatgttgaataggagtggtgagagaggaaattcttgtcttgtgccggttttcttttcttttttttttttttttattatactctaagttttagggtacatgtgcacattgtgcaggttagttacatatgtatacatgtgccatgctggtgtgctgcacccactaatgtgtcatctagcattaggtatatctcccaatgctatccctcccccctcccccgaccccaccacagtccccagagtgtgatattccccttcctgtgtccatgtgatctcattgttcaattcccacctatgagtgagaatatgcggtgtttggttttttgttcttgcgatagtttactgagaatgatggtttccaatttcatccatgtccctacaaaggatatgaactcatcattttttatggctgcatagtattccatggtgtatatgtgccacattttcttaatccagtctatcattgttggacatttgggttggttccaagtctttgctattgtgaatagtgccgcaataaacatacgtgtgcatgtgtctttatagcagcatgatttatactcatttgggtatatacccagtaatgggatggctgggtcaaatggtatttctagttctagatccctgaggaatcgccacactgacttccacaatggttgaactagtttacagtcccaccaacagtgtaaaagtgttcctatttctccgcatcctctccagcacctgttgtttcctgactttttaatgattgccattctaactggtgtgagatgatatctcatagtggttttgatttgcatttctctgatggccagtgatgatgagcatttcttcatgtgttttttggctgcataaatgtcttcttttgagaagtgtctgttcatgtccttcgcccactttttgatggggttgtttgtttttttcttgtaaatttgtttgagttcattgtagattctggatattagccctttgtcagatgagtaggttgcgaaaattttctcccatgttgtaggttgcctgttcactctgatggtagtttcttttgctgtgcagaagctctttagtttaattagatcccatttgtcaattttgtcttttgttgccattgcttttggtgttttggacatgaagtccttgcccacgcctatgtcctgaatggtaatgcctaggttttcttctagggtttttatggttttaggtttaacgtttaaatctttattccatcttgaattgatttttgtataaggtgtaaggaagggatccagtttcagctttctacatatggctagccagttttcccagcaccatttattaaatagggaatcctttccccattgcttgtttttctcaggtttgtcaaagatcagatagttgtagatatgcggcattatttctgagggctctgttctgttccattgatctatatctctgttttggtaccagtaccatgctgttttggttactgtagccttgtagtatagtttgaagtcaggtagtgctacaaaccactgctcaaggaaataaaagaggacacaaacaaatggaagaacattccatgctcatgggtaagaagaatcaatatcgtgaaaatggccatactgcccaaggtaatttacagattcaatgccatccccatcaagctaccaatgactttcttcacagaattggaaaaaactactttaaagttcatatggaaccaaaaaagagcccgcattgtgccggttttcaaagggaatacttctttgcccattcagtatgatattggctgtgggtttgctataaatagctgttattattttgagatatgttccatcagtaccgagtttattgagagtttttagcatgaagggctgttgaattttgtcaaaggccctttctgcatctattaagataatcatgtggtttttgtcattggttctgtttatgtgatggattacatttagtgatttgcctatgttgaaccagccttgcatcccagggatgaagctgacttggtcatggtgggtaagctttttgatgtgctgctggatttggtttgccagtattttattgaggagttttgcatcaatgttcatcagggatattgacctaaaattatccttttttgttgtgtgtctacgaggctttggtatcaggatgatgctagcctcataaaatgagttagggaggattccctctttttccattgactggagtagtttcagagagagtggtaccagctcctctttgtacctctggtagaattcggctgcgaatccttctggtcctggattttttttggttggtaggctattaattattgccttcatttcagaacctgttattggtttattcatagattcaacttctttctggtttagtcttgggagggtgtatgtgtccaggaatttatccatttcttctagattttctagtttatttgtgtagaggtgtttacagtattctctgatggtagtttgtatttctgtggaatcggtggtgatatcccctttatcatttttcattgcatctatttgattcttctctcttttcttgtttattagtcttcctagcggtctatcaattttgttgatcttttcaaaaaaccagctccaggattcattgatttttttgaagggttttttgtgtctctatctccttcagttctgctctgatcttagttatgtcttgccttctgctagcttttgaatttgtttgctcttgcttctctagttcttttaattgtgatgttagggtgtcgattttagatctttcctgctttctcttttgggcatttagtgctataaatttccctctacacactgctttaaatgtgtcccagagattctgttatgttttgtctttgttctcattggttccaaagaacatctttatttctgccttcatttcattatttacccagtagtcattcaggaacaggttggtcagtttccatgtagttgtgtggttttgagtgagtttattaatcctgagttgtaatttgattgcactgtggtgtgagagacagtttgttgtgatttctgttcttttacatttgctgaggagtggtttactaccaattatgtggtcaattttggaataagtgcaaagtgatgctgagaagaatgtgtattctgttgatttggggtgtagagttcagtagatgtctattaggtctgcttggttcagacctgagttcaagtcctggatatccttgttaaccttatgtgtcattgatctaatattgacagaggggtgttaaagtctcctattattattgtgtgggagtctaagtctttttgtaggtctctaaggacttggtttttgaatctgggtgctcctgtattgggtgcatatatatttaggatagttaactcttcttgttgaattgatccctttaccataatgtagtggccttgtctcttttgatctttgttggtttaaagtctgtattatcagagactaggattgcaactcctgctttttttttttctttccatttgcttggtagatcttcctccatacctttattttgagcctatgtgtgtctctgcacatgagatgggtctcctgaatacagcacactgatgggtcttgattctttatccaatttgctggtctgtgtcttttaattggagcatttaacccatttacatttaaggttaatactgttatgtttgagtttgatcatgtcattatgatgttagctggttattttgtccattaattgatgcagtttcttcatagtgtcagtggtctttaccatttggcatgtttttgcagtggctggcactgattgttcctttccatgtttagtgcttccttcaggagctcttttaaggcaggcctggtggtgacaaaatctctcagcatttgcttggctgtaaaggattttatttctccttcactgatgaagcttagtttggcttgatatgacagtctgggttgaaaattattttctttaagaatgttgaatattggcctccactctcttctggcttgtagagtttctgccaagagatccgctgttagtctgatgggcttttctttttgggtaaccagacctttctctctggctgcccttaatattttttccttcatttcaaccttggtgaatctgataattatgtgtctttgggttgctcttctcaaggagtgtctttgtggtgttctctgtatttcctgaatttgaatgttggcttgcctttgtaggttagggaagttctcctggataatattctgaagagtgttttctaacttggttccattctcctcgtcactttccggtacactagtcaaacataaatttggtcttttcacatagtcccatatttcttggaggctttgttcatttcttttcattctcttttctctaatcttgtcttcttgctttatttcattaatttgatcttcagtcactgatatcctttcttccacttgatcgaatcagctattgaagcttgtgcatgcatcacgaagttcttgtgccgtggttttcagctgcatcaggtcatttaaggtcttctctacacggtttattgtagttagccattcatctaaccatttttcaaggtttttagcttccttgcaatgggttagaacatgcttctttagcttgaagaagtttgttattaccgaccttctgaaacctacttccatcaacttgtcaaactcattcttcatccagtcttgttctgttgccggtgaggagctgcgatcctttggaagagaagaggcactctgtttttggaattttcagcttttctgctctggtttctccccatctttgtggttttatctacctttggtctttgatgttggtgacctagggatggggttttggtgtggatgtcctttttgttgacattgatgctattcctttctgtttgttagttttccttctaagagtcagacccctcagcagcaggtctgttggtgtttgctggaggtccagtccagccagaccttatttgcctgggtatcaccagcagaggctgcagaacagcaaatattgctgcctgacccttcctttcgaagcttcatcccagaggggcacccacctgtttgaggtgtctgttggcccctactgggaggtgtttcccagtcaggctacacgggggtcagggacccacttgaggatgcagtctgtccgttgttggagctctaatgcggtgctgagagaaccactgctgtcttcagggctatcagacagggacgtttaagtctgcagaagctacctgctgccctttgttctactatgccctgcccccagaagtggaatctgtagaggcagtaggccttgctgagctgtggtgggctccacccagttcgtgcttccaggcatctttgtttacactgtgagctactccaacctcagcaatggtggatgcccttccctccatccagctgcagcatcgcaggtcgatctcagactgctgcgctagcagtgagcaaggctccgtgggtgtgagacctgccgagccaggcacgggagggtatctcctggtctgccagttgctaagactgtgggaatagtgcagtagttggtcaggagggtactgtttctccggatacagtctgtcacggcttcccttggctaggaaagggaaatcctccgaccccttgtgcttcccaggtgaggcgacaccccatcctgcttcagctcgccctttgtgggctgcagccacagtccaaccagtcccaatgagataaaccaggtacctcagttggaaatgcagaaatccagctgcagaccggagccattcctattcgaccatcttggaagcgacacctatattttttttaaagaaggataggtatccatgagaaagtgactggtttcattatgttctttttatttgttattcacccactagagaatggctcctttctaattactcttcaatgatctcctttaatttctggtacaattttagaaatcataatacatggaaattttatttctttatttctaaattacatgccaatatttctcaaatattaacgtgtatataactacataataaatacatttctgaagttttacatatatacacaggttctatacattacacatgatgtgagtggaggtatatctaaacacatttttatatgtattcatccatatgcttcacatatttgacatgacaggtctttacaggtttgttattggtcttcttatctagactcacacttgctggagcagaagtattcatttatgaacctcggatagcaccagcatttaacatatgcatatttgtgtgtgtgggtgggtgtgcatgcacgtgtattgcattctaggggttactgcctgtatgaggaattagttacctaaggattaaacggaagatgaaaccccaggtgaagtggttgagggcatgaaggggaggcagacccagactttcacccctttgtgttcctgacattcaagagcccctgaggtccaacccctcctccatggagcctgggtcctcagctggcggatccgtgaaactcatctctggggagcattggcttctgtggtcctgcacctgctccttgcagccagttagggctcagagaggacacagagagcacacaaggtcccaggctgcacagagagcacataaggtcctggttatttctgtattggggaccacttaccatatccatgctgagctcccgggatgcaggaaaactctcccaaatgactcaggagctgagtttggatttgtagaacacaggaagtctgaaataattcaatgaggagactggagggaaccctgctacagcagaggaagggtttattgaggaactccataaaactcatgtcaagagacacaggggaaaagaagaatgcagagcccaggagtgaggctgggctcagggctcttctccactgttttgattctcagaagcagctgagaccctcagcccatcacaaaacaagacagactccacgactagtgagtgaggagatgctctcagttatgggactggcacagagggtcaggtcctgtaaaggggaggtgggtgccctgggtggacatacaggagtcccggggtgattccgatctgccctgacctctgtgacctctttgtccagcatccctaggccaacacccccaggattacacagtggagaatctcatccgcatgggtgtggctggcttggtcctggtggtcctcgggattctgctatttgaggctcagcacagccagagaagcctacaagatgcagccgggaggtgaacagcagagaggacaatgcatccttcagcgtggtggagcctcagggacagatctgatgatcccaggaggctctggaggacaatctaggacctacattatctggactgtatgctggtcatttctagagacagcaatcaatatttgagtgtaaggaaactgtctggggtgattcctagaagatcattaaactgtggtacatttttttgtctatgaatgttgacttcccttgactggatcccctttttttcccatccccagacatgaggctccatcccacatggcaccgttgggtccacacctccacacacctgtgtgctctggtccacggcatgtgacacagtcttccttattcctcattgtcacactccttgatgtcacttactgagtccccgtctcttcagttcagagatccaaacctgaaccaccaactaaatcaacgacaggagatcagattccaaccaggaaaacataaatccaccctgctgccctgacaccctctctgtaccttatgagcccttccctctttctcagatgctatctgtgtaatttctcctgaaatatcaccacttggaatcatcacactggcatttcaagtgacaccacagctatgctgattcagaaaaagacatctctaaaatactgtaattagtggtatctaccaatttctgtgacataaatatttttctcatggcccaaatcaaggtgccaatgggttctcactgaatacagggttgggaagcaagggacagaactgtcttcactaatgagcaccagggacctgtggcacatcccactgagagctcacccatatacctacagtcctttctatttcagaggcaatgatcacttctacttcagtgttatggcacaggtcaaatgaaattctgacactgttatcctagcatatccacaaaagacaaacctattaatatc[140 bp omitted]ggtgaaaccccgtctctactaaatacacaaaaaaatattggccgggcgtggtggtgggcgcctgtagtcccagctactcaggaggctgaggcaggagaatggcgtgaacctgggaggcggagcttgcaatgggccgagattgcgacactgccctccagcctgggcgacagagcaagactccgtctcaaaaaaaaaaaaaaatccaagtacaacataagaaaaatgttaacagaactatgcagtttcgatgaaagaattttttttgagatggagttttgctttgttgcccaggctggagtgcaatggtgcaatctcggctcactgcaacctccacttcccaggttcaagcaattctcctgcctctgcctcccgagttactggactacaggtgtgcaccaccattcccggctattttttgtatttttagtagagacgggggtctcgccatgttagtgaggctggtcttgaactcctgacctcaggttatccacctgcctcagcctcccagagtgctgggattacaggtgtaagccactgtgcccggctgatggaagaattcttaaatgactcgttctactttctgctggtccaggcactccttggcttggggcagcatcccaccagtttctgcctccatcttctcaatgcttacacctacctggttgcctctgtcttcacacccattcttctgtgtgtgtcttttctcttcttcagattatgatatcactcagatcagattaggactcatcctaattcgttatgatcccttgatcataacttaaatgcatttgcaaagactctatttccaactatgttcacatttatagctaatggggctcaggatttcaacgtgtatattagggggaacaagtcaatttatgacagtgtctacaagaaaagtatgcatagaaatacatttaaccaaatacaaaaattaggtgggtgtggtggtacacgcctgtaatcccagctactcaggaggctgagacaggagaatcgcgtcaacccaggaaacagaggttgcagtgagctgagatcttgccattgcactccagcctgggcaacagagtgagactctgtctcaaaaaaagagaaatacatttaaccaaagagatgcaatacgtatacattgacaattttaaaatactgctcaaagaaataacaaaagacctaaatgaggaaaaagtcatcccagtatcataaatcaaaaggcttaaaattagttatctccctctagggaacctagactaatacactcaccccgtctccttgttcggaggctctcctgcctatcagcttttctcctctgtgctttccatgtccctgtggttctctggtgagccccatcatgctgtcctagaagatccacttagaatttcggtatttactcaccattttgactcctcttaacgagacaggcacatgccagctgtttccattcatccaacctgaacctgagcccccgatcattttttctaccacttttcagtcctgggaaactcagtcccaatgtgcttgtcattcatttgagaataattttcattttctccagtagttttaaaattactttgtatctattctagatatcgtttgctctatcatagttaagacattaatgttatttatgaatttgtgcacattaaactcatgatctttcatttctgtaaaaatgtcaactatttcctttgcaagtatttattgactaacatactccttatttccttcattctgaaagtgtgacacatagagatatatctgtttcctcttctcactctattctttgtgtgcattaattatcttttctatttttttcatttctagtttttctccgatgactaatgaaaaatttaataaatattctacaccaatacaatgtttatcatttcagcagtgtctggttcttgatgaaagtatttctaaatgtgttaatataatttactattttcacatcacaatagcttcctaattcatttctataattgcctgttttttctctaatggactcttcgatttttattcctctggggtgggtttttctcccacacacctgatcttccatacagggtttctcccagggatgactcaggaaggaaaactgatgaggggcatttttgtacccgctcctgccctgcggtgtccatgctcccaagtttagaatcagctctgtgttatgcctggcatggtggagcccatgagaccctcacattcaagtgccaaagatgcccggtccagcagtgataaagcgagactgtgtcatgcacacccgggaaggtggctcagtgctgaatgtggcctgggtcaccaaaccaagcaatcccagattctgtccacaaatacagaagagagggagccacagtctctctaggatcccacggtttcctccactttttcctttgttctgagagaaagacaaagtgccatgactgctctgtgggctggacagatgcctgttttcacctgcaggcttgaactcaagctgaggtcttgagcattcccaggtactgataaagcaccttagattgtttctagaaaacactgaaaaattaaccctttgttaattatgtagaaacaaaccctgccctgaaccaaactcctgaaacgctcaggttaaactttgtaactcaatcccttcactgcagatacccagtaggaaagtcacatgagcaaggatgagatgactttggttaaactcagaccccacagggccaggaaggcctgacggagaggaggctcgtgttgccaggtctcagataagaactgtttctaaggacttttttaaaaaccccataagaaactcttccatgtctttcacccctctcctgctttgacatggtttattactagatattctttaggacatcaggaatgcagataggctgctctcgagagaatacttgcccagcaatggcatctcctccaatggactgacagcaactctggctttgaacctctggaaccagggaactctgcttctaagcagctctgtcagcctctcccttgttgctgataagaatttcctttacctctctatgtacagagagctctctctatgatgtttttcctctactctcacaccacaacagtcatcaacacaggagacttgtaggatcagatgtgtgggattgtttcccagacccaatagcgaacagcagctgggtgtcctctaagtcggctccgagctgtctacccagacacagtcccagatcccacagattgaaggcccattctccaagattgcccccacacaccattcccaagtccagacctccagaacttctgactgactggcttcaagttggggatcccatgaccacctctttgggtttgattaatttgctgtagcagctcacagaactcagggagacactgacgtttactggttgaatacaaagcacactgcagaggacacagatgaagagactcataggaggaggcatgggggaagggaccggagcatctatgccctccctgggcgccacgctccaggaacctccgcatgctcagccatccagaagcccatgaaacccagtcctcttgggcttttaaggagcttcgtgacatcagcatttcctcccacaaggaacagggtgagaccatcttctgggagggtcttaagagccaccatcagaaaggcagggaacattcgagtcttgccttgggcaggtgaaggaagggcaggaggaggtcagaggcctcccctaaggcctaacacagccaatactctaacaaaagactgtaaccagtggtatggagttataagccaggaaccgcgggtgaaaaccagtgtgtatcacaacatcacacttccctctccggatgcactgtgtcttgccatgccatgcactccagattgtaatctttgcttctcattgtcaaatacaagcaaaatccaggcaaccctggagcaatgcagccttgaattcctggggtctcttgtatgcacactctcttcaaccaaacggggatcataactatggcatttgtgggatgcaaatcctgtgtatacgaatggcagactttccctatacatggtgcagtggagccagcttcagggctggagtacaggcaggttttgtgacatgtgggccacggactggagccagttcccttgtacaccaaagaacaactgtacttagagataattttctctagatttttgttttgttttgttattttaggttaaagcattggatagaacacccagtgtcaccttgtctacctccaggacatgctgcagggcccactctatggaagtccctctaacaaatgctctatgaacaccctggtgtttagtgcttctttctttggaatcccagcagctctatcactggacggtttggtgcactcctttgatggaattcctctgggctgcttggggtccactccagcctcaggtgtagctggaggacgcagcctcccaccttggtctggagccctgaggccctcactgtcattgcagatcccgaggttcctctcccacctccattcagtggtggaaaactccattctaattaccccttgaaggtcctgggaccctctggcctctgttctttcttgtggatccacctacacttgggaacttcctcacctctttttctgctcatgacattgatgctctgggtatttcagaaatgcctcatgtacatttctccattagggtcagatgtgagatccagagtggacacatcaatcatctacacagactggggggtccaacatcgagatcctttcacatcccaaacagttcaggtcttaccctggtctggaaatcaagcacaaatgagcccctccgaatgtcccaggcaccactgacccaacaaccactgtgaccagtgggattcatgacaacaatctgcaaaggaggaaactgaggctcagtgatgggacattacaaaccaaggtcatgtaggcagcggatgataaccagtcatcaaataaatatcaactccctcccccactccccaaatcaaagctcaaacataagtcattgttctcaaaacgttgaacagggattgaggtgcagagggatggccaagtaagcaaagggcaccgaggaggcaggaaagtctcagatgtttgttcccagcgggtgggagtggacactgtagcaaaatattttaaaaaggggaagttgagaggggactatttggttgaaagaaaacccacaatccagtgtcaagaaagaagtcaacttttcttcccctatttccctgcatttctcctctgtgctcactgccacacgcagctcaacctgagctacacagccagatgcgagatgcttctctgctgatctgagtctgcctgcagcatggaccttggtcttccctgaagcatctccagggctggagggacgactgccatggtaaggaccccacaacgctgagctgatggatggctgaaggagggagggtgaccatgtgggaggctgtgagaaggaaagggaagcctccgttaccctcatctggaagggcagacgcagaaagcaccagttctatttgctgctacatcccgtctctcagtgagaagaggagaaaccagacagacagtggctgggggtcaggaaagaccccattacagtctgaaatgtctgcagagggcctggttcctgcccccacctcagctctaaaagaatgagagtcaggctcctggtagggtagttctgcttcctgtgtggctgcagatgacaacaccccatgagaaggacccagcctccgagtgtccacactgggtgggaaggaggggaggctatttctctctgtgtgtctctgtcctgccagcaccgagggctcatccatccgcagagcagggcagtgggaggagacgctatgacccccatcgtcacagtcctgatctgtctcagtgagatttgaagagggaggggagcttctaacctaggagggacctcaccccacagccgacctctagtccctaaggagaccccaggggctcacaaagatcccagggaggggaggacctgcccaggcttcaggggcaaattcctcacagggaactctcttccagggctgagtctgggcccccggacccacgtgcaggcaggtgagtctgtccccagctctcccaggtccctcctcctcactggggacaaggggccacccccgtgcagctggggatggggaatagcagttctggactgactgatgggggcatctggagggtcctgggctgagagctgagatatgttgggtgggaaatgacttagaatctgaactctgatttccttccagggaccctccccaagcccacactctgggctgagccaggctctgtgatcacccaggggagtcccgtgaccctctggtgtcaggggatcctggagacccaggagtaccgtctgtatagagaaaagaaaacagcaccctggattacacggatcccacaggagattgtgaagaagggccagttccccatcccatccatcacctgggaacacacagggcggtatcgctgtttctacggtagccacactgcaggctggtcagagcccagtgaccccctggagctggtggtgacaggtgagctgacactgagggctcccagccccaggctctgccctcaggaagggagtcagttctcaggggcatctccctctcacagcccagccctggggatgaagtgggaggtgtgagccccatttaacatggtgcctccttctctcctaggagcctacatcaaacccaccctctcagctctacccagccctgtggtgacctcaggagggaacgtgaccctccattgtgtctcacaggtggcatttggcagcttcattctgtgtaaggaaggagaagatgaacacccacaatgcctgaactcacagccccgtacccatgggtggtcccgggccatcttctctgtgggccccgtgagcccgagtcgcaggtggtcgtacaggtgctatgcttatgactcgaactctccccatgtgtggtctctacccagtgatctcctggagctcctggtcctaggtgagaaattcacagcattgcctggagttccctgagtctccctgagtctccaggcaggtggggagcagccacgtctcagggcagctccaggtgggatgatgttggggcgagagggctcagggctcctggggccggagacacaggaagatcagcagtggtgaggccccgggggagagggaggatatgtggggaagcctgagggtcggctcctggaaaccatgagcaccttttcccaggtgtttctaagaagccatcactctcagtgcagccaggtcctatagtggcccctggggagagcctgaccctccagtgtgtttctgatgtcagctacgacagatttgttctgtataaggagggagaacgtgacttcctccagctccctggcccacagccccaggctgggctctcccaggccaacttcaccctgggccctgtgagccgctcctacgggggccagtacagatgctccggtgcatacaacctctcctccgagtggtcggcccccagcgaccccctggacatcctgatcgcaggtgaggagcccagcgggttcagtcagggacacaggctccgcacaggccctgccaggggagcccaggtggtgatggccggaatgaggggtgggggtcccaagggagggagagacagacagagacaggggatgggcggggcggggaagactcagagaaaacagagatagagactgagggtcccagatagaagcctggggaggcgtcagctcagaacaaggtggggcagcctctcacccatccttcttctctccaggacagttccgtggcagacccttcatctcggtgcatccgggccccacggtggcctcaggagagaacgtgaccctgctgtgtcagtcatgggggccgttccacactttccttctgaccaaggcgggagcagctgatgcccccctccgtctcagatcaatacacgaatatcctaagtaccaggctgaattccctatgagtcctgtgacctcagcccactcggggacctacaggtgctacggctcactcagctccaacccctacctgctgtctcaccccagtgactccctggagctcatggtctcaggtgagggccctgaccctgtcctctccgagctcaaaggatcagctcaggccctgccccccaggagagctctggacactaagaaaagaggggagttggctgggcacggtggcttacacctgtaatcccagcactttgggaggcccaggcgggtggatcaggaggccaggagatcgagaccatcctggctaacacagtgaaccccgtctccactaaaaaatagaaaaaattagccaagcgtggtggcaggtgtctgtagtcccaggtactcgggaggctgaggcaggagaatggcatgaacctgggaggcggagcttgccgtgagctgatgtcatgccactgcactcaatcctgggcaagacagcgagactccatctcaaaaaaaaaggaaaagaaaagagtggagtgaagggggaaggtctgcgggggagggtcgagcccatgggagggtggaaatagacggggcctcccacccctggctcccacccttgtagtctcagtagggtaaagagcagggaaggctgggaggagatgggggtgaacctcagaggagatgagagtagactgagggtgaaagacagaggccccacctgctcccctcctgatgtctccacctcagaatcagagcctctggggatcccaacctctaagtcctgaccccatgggtgacaaaaacccagtcactcccagctctaaagaagtttctagactcatctcaatgctacctctaatattcagggtctgatttccagggcagcagaggggagggtggacagtaagggtgtggtctgcatggcttcctggtgctccagggatggggcaggtgttccctccgtggtgttcagaggggagagaggtgtctgaggttcagcattgatgagtggagcagcggggtctttccccctccccgagcaggattccaggagacatcacctctggttgagactctccactgtctcatgtacataacaaaatctctccaattttctactgaaagcaacacgtggcacagctctgcaggaccccacaccccgaccttgtcctgcaggatgtgtgacgagtagaagagggagaacaggtcgggtcagcaggatttggggtccagcctgacttggacacgtggaagatgctggggctgatggaggaggaacagaggcgggcgagttggaaagaggacagacagacggtcccttggcagctctcatttctcatttccaagggcccctgaggatgaacccctcacccacacctgtagggtccctgggccatctcaagacaagagaggaggccttggtgggatctgactgtgatgagggtgaagtccaccccgagcagaaatgagtgatacacaacacgtgctgtgaataattccctaacttgccagggagcaagtgcacggcccctccttagtctcaggggtgccctgagcccaagcccaccaggtgagcacaggaggggccgtgtgagcggcacccacagctggagtgcttctctctaaaggagcacgttttgggtggactcaaccctcaccacagtcagatcccaccaaggctctgtgctcagggcacccggagactaaggagggaccgtgcacctgctccctggatgagttagggaatgattcacagcacgtctcatatgtcattcatttctacactgtattttctgtacgtatgctttctatatgtatgctctctcctttactaaaacttttaaagcaatacttcaatatataaatttatattttttatttcaattatatgaacctattatttaaaaacatttaattttactttgcctttcattggggcttgatttaatttatatattcaatgtagacatccatttttcattaacctcaagtcttcctcctgtacatattaaaaatcgaggtttccttaacgaacttcagaaatgtttggatgtttccaagcacaatggcccgagcgaaactgactgggcggctccctgtggcatgagaaacccgggggaggtcagcgggagctacagtgcagctcagccctgggcctggggggttcatgcccaaccttgtccaatcactggataattctaacatctaaataaacgtcttttatatgaaaaaagtgctttaaattgttaatttagatttaaattagaacagggcaatttggtagtgggttaatatgaaatacaatgaatatacccaaaccagtggctttctcatgagtacttatctctcgttttaaaaaatgtaaaggaatcaaatacttcacttataaattgttaaaggtgttgaataattctttaaattagaacgaatataattaaaaaaaattttttttgagatggagttttgctcttgttgcccagtctggagtgcagtggtgaaatcttggctcactgcaacctccgtcttccagtttcaagcaattctcctgcctcagcctcccgagtagctgggattacaggcgcccgccaccatgccccgctaatttttgtatttttagtagagacagggtttcaccatgttggctaggctggtcttgaactcctgacctcatgatctgcccacgtcagcctcccaaaatgctgggattacaggcatgagccactgtgcctggcctgaatataattttttaaatgtctacccaggacacccacctctccttgacagggaggttatataagttatacataatcttatatagaatttgttatataagttacctctgaatatgtctcttctcctctgttttgattctcaggagcagctgagaccctcagcccaccacaaaacaagtccgattccaaggctggtgagtgaggagatgcttgccgtgatgacgctgggcacagagggtcaggtcctgtcaaggggagctgggtgtcctgggtggacattttaaaaaattacattcattctaatttaaagaattcttcaacacctttaatgatttataagtgaagtatttcattcctttacatttttaaaataagagataactatccatgagaaagctactgctttgagtatattcattgtatttcatgctaactcactactaaattgctctgttctaactgcttttcaatggatctcctctaatttactaatacaatttgtataaaccgtaagacaatgggaaattttacttctttatttctaaattatgtgccaatatttctcactttaaatgtcaatatatatgttactacatcttaaataaatatctgaagttttacatatatacatatttatgtgtggttaagtaagatacttttgaatatgtgtgtaagtatatccaaattcatttgatgtatattcatgcatatgcttaatatatttgatgcggtaggtgtttacatgtttgttcctggtctagattcacctagattcacacttcataaaaacaaatactgatttatgaaccttgagtgacatctccatttagcatatatatatatatgtttgtatgtgtgtgtgaatgtgggaaactgtattgcattctaggtgttactgcctatatgaggaattagttaactagagattaaatggaagatgaaaccccaggtgaactggctgaggctgtgtgaagaagaagcacccccagactttcacccctttgtgcttctgacactggggagcccctgcagaccaacctcccatgcatggagcctgggtcctccgctggtggataagtgaaactctcatctctgggggaattggctcatgtgctcctgtgtccctggctgcacagacagcgcacagggctcagtgacttctgtattcctttgcagatcctgagctcccagagtgcaggaaaacgccctccccaaatgcctcaggagtaacattcgaatttctagaatgcaagaaatctgaaataattcaataaggacactggagggaaccctgctacacaggaagggtttattgaggaactccctagaactcatgtcagaagacataggggaagataagaatgcagagcccaggggagaggctggctcagggctcttcccctctgtttttattctcaggagcagctaacaccctcagcccatcacaaaacaagactggtgagtgaggagatgctctcgtttacggtgctgggcacaagggttgggtcctgtcaagggtaaggaggtgctctgggtggacatccagaggtcctgggtgaagttgatctgccctgacctctgtgacctctttgcccaccatccccagcctcacacccccaggattacacagtggagaatctcatccgcatgggcatagctggcttggtcctggtggtcctcgggattctgctatttgaggctcagcacagccagagaagcctctgagatgcagccgggaggtgaacagcagagagaagaatgtacccttcagagtggtggagccttgggaacagatctgatgatgccaggaggttccgggagacaatttagggctgatgctatctggactgtctgccaatcatttttagagggaggaatcagtgttggattgcagagacattttctggagtgatccatgaaggaccattaacctgtgatacctttcctctctattaatgttgacttcccttggttggatcctcttctttccccacccccagacagacatgaggctacatcccacatggcagcgttgggtccacacctctgcacatctgtgtgctctggtccatggtgtgtaacacagtcttctttattactcattgccatactccctggtgtgctttactgagcctccatctcttcaattcagagttccaaacgtgcttcagtaactaaatcaatgggagagtatcggatttcaaccaggaaaagataaatccaccctgatgccctgacaccctctctgaaccctacgagcccttccctccttctcacatgctacctgtgcagcttctccttagatcattgtgtaaccatcactgccatcctgttccacacatggtcatcaccctacacccattcagcagccactccccattccctcttccctccagcacctgctaaccacaaatgtgctttctgtctctacggatttgcctattctgtctgaaaacatttcaatctcctttgacctgtgagctcctcacttcgagacttcctgcctttccaggcagaaccaaagtacaccacgtcaaaagcaatgataggcatttgcagtgtgttggtgatccacgaaaggaaaatcacggaagcaggatagaaatccagctgcagacaagacctcaggtcgatgaatcttgacaagcagttgagctgtttttttctactcacctaggacagtcaggcagaagtatgcaaaatgactggggctgattcttttctgaattgtcgcaaacagcaagaggacttgagtcctagcattaaagagttcaacatgtctaggtccaagaccactgttgtgtttgaaggatgtaaaaccctgctgcataggatggaatatttggagggaggatcctgaaaaacatgagggatcaaatagtcctcaactttctaggacaaagggagcagctatttgccatctaccctccagaataaagaaatcttatcattcaccatctaccctctagaataaagaaatcttatcattcgccatctaccctgtagaataaagaaatcttatcattcaccgtctaccctctagagtaaacaaatcttatcattcaccatctaccctctagaataaagaaatcttatcattcgccatctaccctctagaataaagaaatcttatcattcaccgtctaccctctagagtaaacaaatcttatcattcgccatctaccctctagaatagagaaatcttatcattcatcatctaccctccagaataaagaaatgttatcatttgccatctaccctctagaataaagaaatcttattaaggacattttcaaagccttaacagaatatgaatgattacaatattatgttttacctatacagcatcttccaagttctagtttggttgtgccaggccaaacatttgagccagatttcggcaagatcaagcaggagactctggcgtctgtcgctgattaccttcccgccatacctggccaccagcctttcccatggaccccacgtgtgtctccagactcttgggtatgaatcctgtgaacacactgacctctgctttctacatgactgacaagcactatgaaatttgcataaatatgaatagaaaatatactgtccccacatcccctaaaataaaactgagtcctcacccatgggcttttgctggattatactaagaaaaggcaggtcttacaacacacattccatagactcacatctcagagaagattccttccacaggctcagggtcctgaacacactgctccactctcagggctcggagacactctgcaggtgggtcttcaccccatccgggagccctaattccttcttcctcggtttttcatacagtgatttttcccagtactgctgtctactttcctctgccagaaattccttgctggatccatggcaatctcctcaggactcctatttcataaaatggaaatggaattcttcatatgccttaaaaagtaaaataattatccaaacaatataaaatacaaacacccatctagcaaaatatttcttagtacatcatgaattcaaatatatatcgtacaaaatgactgaggattttattaattttgagcaatattgaggttttctcataatatctttttattgttaacttcaaactaaataacaatcatgtctgggaataaaatgtataagatagtcatttagaaaaatttggagatttttccttccttgtccagtaaatacttaacattttacgtgcaatgtatgtcataaatatgggcattcccccctttgaggtatgtgttcattaatatacacacatatatatactcacacacacatatatactgtacagtggcatctacacatactatatatccacatataatgtatttgtatgcaatatgtaaatatatacacacataacacctagagtaagtgtatgtatacaatatatcagaatatatatgtgaattctttttccatacaaactgtgtaacatttctttacacatctacacacatatataccgtgtgtgtatacatatagtgcttatgtacataataggtaaatatatacacaaattaacatatatatgtatacatacatagaatttgtttttctatatacaaaccctataacatatgtaactagagagttttaccatatgtatgtaattcagattgaacattaagttgtatactcattcattttttttcttaacctctcagttcttgataaatatttctttgaatcaccaaatatatacaaatttatgttgtatatatttcaataacccatggttagatgaatgaaagtttacaattattttatcattttttataccgtctctctctcttttttttttttttaacacagatgagtctcactatgttgcccaggctggtcttgaactcctgggctcaagtgatcttcccacctcagtctcccaaagtgctgggttacaggtgtgagccaccgtacccagcacttaataccttcattaaaacataaaacttcactattttcaaaaaagttttgtattatgttacattttgtggactattaatgtttctaatagataattttaacagcatgtctttcttcccttactgattttaaattatgattttatattagatgatactattgtgtctcatgcctaatgtgttattgggggtgttgggctatttaactcatcctgagtaggggaatcactctttaacatacggggtaaaaaatgaataatttagaataatttcatgaatttagttaagtattcgattatatatttttgaatgaagattcatttatccttgtcctttagaaaagacatgtactcttatatgtgtgtgtagttacattcgtgtgtgtgcgtgcatgcaattttcaaatacttgcctgtttcccacttttcatcaccggcatctcacatcctacattttggattcattgatctatctggataacatcatttaaaattgctttcactgagtatgaaaacagtaatatctagtaacttgcagctcagataatgctttatttttcctcccactttctctatcaaaatagatgaaaacatttctatattaattaaagggtaagatataacacctggaagagaaagcacatctgatgattgagggatccaccctccaatccctcctcagccctcatgcaggggaagcccaacctaatgggcttcacaggtctgtcttgctctgagcctttttctgcttaggaattggtcccctgctgacccctttaacttttaggtattaacctgagtaagcatagagttcctcacttgctgttaatcccttgagagtacattttcaacatttccttgcctttcatttttctgttgggaagtccgatcccagtgatcatgctattctactgacatgttgagttgaaaatcacaggacacaaaaatgtgttttaaactatacaatttatgctagacaatttcagtctagcatatatactttttaatctacttctggtatttttcaatttatcatggtaggtcaaggtttacattgcatgtttaaatgtatgcatcttagcacttaattagtctttcctcgtctctgtcaaatgttcaactctttaattcgtgagctgttgccagacattattctcccttctttccttctgacacgtacaatagatatgaggttctccctcctcacaatattcccccaaatatggtgaattttcacttttggtgtctccatagtgcattctggaaaattctcccaattttgttttccaatttaataaatgtctctttagctgtatcttgaccttgatagaataaatattttgagtgtgcttcttcaactgaatttttgcctctaggatttctaactcatttctctgatgctcattttttgccagtataatccatattcttgtctcagaaatttaatttcctcttgtatttttttcagatatttaaacatgtttaattgaaaaagggtcttatgcgttcctagtattctatttctttgcacataataatccttatcaacaaatgtgtagactgatgatcatagcactttttatcattagaaggatggctcttggttgtctatttttgttggacactcacctcctacactcctgagctaccatggagggatcctctcaaggcagtttttagtaatccaggactgaaaatgggggactgttccagctactgatgacacgtggcattcatttcccaaacatagtgtctgctcaggttgctcccagaaggaaaaaaatgcatgtgaaattcacactcatggccgggcacggtggcttatgcttgtaatctcagcactttgggaggtcgaagtgggcagaccacttgaggccaggagttcaagaccagcctggccaacatgacaaaaccccgtctctactaaaaatgcaaaaaaattagccaggcctggtagtgggcacctgtaatcacagctactcagaaggctgaagcaggagaatcacttggtcatgagaatcaggcaggagaatcacttgggaggtggaggttacagtgagtggagatcatgccactgcactctagcctgggcaacaagagcaaaactccatctcaaaaaaaaaaaaaaaactcatacccacacatgatacagatacccacatgtaagaactctgcagtgaatgaatttgtttcacacacacccaggggagttggctcagtggtggccatgggcctgggtcggtaaatagacatattccatcacagctttcagccttgcccagagccctggcccttctctgcctgtgaggacccagggccccttttctgttctgcacagaaatggaaacttcctccctaatgacccctaatggcaccagacacagatgccctctctgtttcgtgtgtatccttctccttctgatgaactttcatttctcattttctggacatgactgtgataaccggggtgttgatgaaatattatgagaagcatctctcaagggcaggaacaaaggggctctccttagtggaaacatcaatctcaggccttgatggtgggcgccagcatcccctcatgcccccacccctcctgtcttcacctgctctggaaattacccatggctgagccccctgcagcccccaggctccaatgacccagctcccctgtgataaatggggttcatgacaggctccaaatgaggaaaccaaggctcagagatgggaggttactgcccaagttcacacaggcagggggtgacacaagaatatttaaataaagacaagatttcccctcaaagcagagtgctaaccccacgtattgtcccagaaccttgaactcaggagcacaggatgggaacaggagtgtttgaaagaagacgggggcaccaagaaggcagagtcaggtcaatgttgtttccagggagacgggggcggatgctgttgcgatgagtcaatgagaagttcgtgaagggaacgtttttgcataaagaaaacccacactccagttctggggaaagagtcatgattccttcccttgtctccctgtatttcccctttctgttcattgccgcaataaagctcaactggaactgcagagcaagatgtgagatgagtctctgctgatgtgagtctgccccgcagcctgaatttgcatcttccctgaagcttccccaggactggtgagaagactggccatggtagtttccccacaagagtgtgtttatgggtgagctgaaggagagagtgaaaccccatgaggaggctctgagaggaaggaagaaccctccgttgccttcacctggaagggatcaactcaggaaggcaccacgtccatttgcagccacgtcctggcccttaatgagaagaggacaggacaggcagacagtgaaaggagatgaggagagaccccatgtgtgtctgaaatatcaacagaaagcctggtacctgtctcaggccaagcactaggaaaacaagagccaggctcgtggcggggtccgggacagtacactacccatggagatgctggtgggaaaatcctgtaagggagagaacccttcctttgtgtgtgttctgtggacaccatggtcttatccacccacacagccggggccagtaggaggaaacatcatgactctcacccacacggccatggtccacttcactgagatttgacaaggggaatgggagattctagcatgagagggaccctgccccacaggtaggccctggtccagtaggagaccccaggggattagggaagatctcaggaaggagaggacctgcccaggcttcaggggcaaatctctcagcgggaactctcttccagggctgagtctgggcctcaggacctgcgtgcaggcaggtgagtctgtccccagctgtcccaggtccctcctcctcaccggggacagggtcccacccccgggcagctggggctggagaacagcaactctgggctgactgagagggatcatggggggatcttgggctgaaagctgggatctgaggggtggtaaatgatataggacccagtttctgatttccttccagggaccctccccaaacccacgttcagggctgaaccagactctgtaataacctaggggaggcccgtggccctctggtgtcaggagaccctagaggctcaggagtgtggtctggataaagaggaaagcccagtgttcaggagcacacagagctcgccgaagcccaggacagcgtgagtcctccgtctcactcaggacaaagcaccatgcaggggaatattgctgtgagtatttcagtcctgctggcaggtgagcactcagagaccccctgcagctggtggtaacagtgaggggacactcaggggccccagccccaggctctgccctcaggaaggaggtttgctcttcggggcatcttgcctctcagagcccaggcctgggggatgatgtgggaggtgtgagccccatttaacacggtgcctccttctctcctagaattccactaataaaggtcctatttgacagttccaatattggaaataagagttccatcttcggccaggcacagtggctcacacctgtagtcccagtactttgggaggccgaggcaggcagatcacttgaggtcagaagttcaaaagcagcctggccaacatgacaataacccgtctctactgaaaatacaaaaattaacctggcgtgtggtgtgcgcctgtaattccagctactggggagggttcgcttgaacccacttagcacctggaaagcgagagcacggactaggctgacccagcccgcacctgcctctgcccatacccccaccctggtaggttaacacaaaggacaaagactttcgggagctcaatggcctcgccctttgcctgagacaccggacagcctcccttgcgtaacataaggaaggcaaaaagcccatgaagaccaacacagcaaaattcataattgcaaagatgtggagcgcttttgcaaccgctgcctccgggctggaggccgactgacaccgtgcaggacagcatccgcaggctcaataacacagcacccaggaaggagaacacgtgtgcatgtcctcagctatcaccattgccagcaaccccctggataaccaagaggtcctgagtctgttcacatggccggttcattaccaaagctggtgtttgagaaagccaaaaccccaaggctatttataaccgaggaaatctcacatagtgtatctcactcctgcaaacttcaccagcccgccccactccctcgccccacctcagtgtccccgagccactttgcttgcactcgctcgcccacagccactgccgccagggctttgccagcattatgtgctcctgagcagaccttctctcccctccccaacggcatgtgtgttgcacgtgcacctcgcagtgccacagctgccggtgtgagttcacccactcacccaacgacccccgagcactgggactgctgtcagagcattcgtgggtacagagattccctgtccagtacccatctgtcctccaccctcccggcgccaacactaccaccggtgtgatcacacacagggagaccagcggatccacccccaccgcaaacagcagcagccgccagcgtggaagtgcacacagagggtgcacacagtcccatgaggccggagccccgccaccttgctaacaccactaccggtgcaaatgcgcacacgaacgcctgcggggctcccgcgcaccccacccagtcttgctgacgccaccgcattgaacaccgacatggaggccagcacccctgcacccactagcatcccactgcagtcaacaaatgtgtacatcccagaggaaaagacatcattacatcagaaacacacttgcatacaaatgttgattgcagcaaaattcataattgcaaagatgtggaatcgacgtaagtgtccatcagctgatgagtgaatgtggcacatatacacaagaaaacactattcagccattgaacaaaatgaaataatgtcttttgcagcaacttggatgaagctgggggccatgacactaagtgaactaactcagcaatggaaagccaaataccatatgctctcactttataagtgggagccaagttatgggtaatcaaagacatgtaaaggggtgtaatgaacactggagacccagaagggagagagggggtggagagtgagtaatgaaatactatgtaccaagtacaatgtacactacttgggtgatgggtgtagtaaaatctcaggcttcaccactatacaattcattcatacaactagaaaccacttgtaccccaaaagctattgaaataaaatacatttttaaaaaaactgtaatacaaggctacagtaaccaaaacattatggcactggtacaaaaacagacacatagaccaatgaaacagaataaagccacacacctacaaccatctgatatttaacaaggccaacaaaaacaggcctattcaaaaaataatcctgtgataactggctagccatatgcaaaagaatgaaactggacagaccctacatatcaccatatacaaaaattaaatcaagacagattaaatactttaatgtaagatttaaacctataagaatcctagaagaaaacatggtgaaaccctgtctctaataaaaatacaaaaaagaaaaaaaagtagcctggcatggtgacaggtgcctgtaatcccagctacttgggaagctgaggcaggagaatcgcttgaacctggtggggaaaggttgcagtgagccgagatcacaccactgcactccagcctcggcagcagagccaggctccatctcaaagaaaaaaaaataggaaacatcttccttaatacaggcattggcaaagtatttacagctaagtcctcaaaagcaattaaacgaaagcaaaaattgatgagtgggacctaataaacctacagatccagcaaaggtctaatattcagaatctgtaagcaacttacacaaatcaacaagcacaaaacaaacagccccattaaaaagtgggcaaaagacgtgaacagacacttttctaaagaagacacacatatgtccaagaagcatatcaaaaaatcttcaatatgactaatcagtagggatatgcaaattaaaactacaatgagatacccacaccactcagaatagttattattaaaaagtcaaaaaataacagatgctggtaaggctgcaaagaaaatggaacaagtgttggtgagaacgtaaattagttcatccactgtggacagcagttgggagatttctcaaagaactaagagttgaactacaattcggcctagcaaacccattggtaggtatatgcccaaaggaaaataaattattctaccaaaaaggcagatgcacctatatgttcattgcagcaccattcccaataacaaagatgtggaataaacccaggtgttcatccaacaatggattggatatatggaccatagaatactacacagcaatcaaaatggaaatcatgtcctttgcagcagcatggatggagctagaggtcattagcctaagtgatgccatgtggaaacagaaagccaaacatagcacattcttgtaagcaggagctaaacactgggcacatgtggacatagataagtgtctgttcatgtcctttgcacactttctaatggggctgtttgtttgttgcttgctgatttgtgtaagttgcttctagattctgaatattaggccttcactggatctgtaggttaatgaggtcccactcatcagttgttatttttgtttaattgcgttcaaggacttagctgtaaacgctttgtcaatgcctataacaacaggatgtttcctgtgattttttttttctttgagacagagtctggccctggcaccggagacacttagagtggggagagagggaggagggcaagggctgaaaaagtgcctgttgggcgctatgctcactacctgggtctacggattcattcgttctccaaacctcagcatcacgcaatatacctttctagcaaacatgcgttatgtgcccccgcattctaaaataaaagttgaaaacaataataataatatggaactaaaaattaataggcatgcatcttagcaatataaactcaagtacaaaatggaagaggcccacgttttagagattttgaaatttaaaacacctataaatgtgattgtatatataggcatgtagggacaactgggcttcatctgtaagaactacaggtggaaagtggagactccttactggcctgagagcaaggagacagccctgagtcttggtgtctgaggagaagaagtatgtgtttctgttcgattcttggtcagaaaaaggtgttataaagaagaatcttggttccctgtctcttttctcatgccagatacttataatagtaactatacatgtgtatatatatgtgtatatatatatttgtctttataaaagctcacatctcccaagtatcacacaaaaccctttttgtctttttttctacaccccatggagaagtacaaacaggatgtgatactctaatatcactcagttttctaaaataagtaggttgcaatttcctatgaagtgaaactattcctagttcacattgagaaagtaccagattcagtttctcataggaccaacaattgtctggaccaagggaaattacaaatggtctggtcttacatttttctccagctacctgtgatgatctct[136 bp omitted]catgatgaaaccccgtttctactaaaaatacaaaaattagctgggcatggtggcaagcacctgtaatcccagctactcgggaggctgaggcaggagaatcgcttgaacctgggacgtaggaggtcacagtgagctgagactgccctactgcactcccagcctgggcgacagtgttagactctgtctcaaaaaaaaaaaaatgtgtatcactcaaactgacaccttcatggatcttagaaccctgatcatgttcccatgagaattccattcattccattcaagaagatctaactttcacatatacaccatggaatactatgcagccataaaaaatgatgagttcatgtcctttgtagggacatggatgaaattggaaatcatcattctcagtaaactatcgcaagaacaaaaaaccaaacaccgcatattctcactcataggtgggaattgaacaatgagagcacatggacacaggaaggggaatatcacactctggggactgttgtggggtggggggaggggggagggatagcattgggagatatacctaatgctagatgacgagttagtgggtgcagcgcaccagcatggcacatgtatacatatgtaactaacctgcccaatgtgcgcatgtaccctaaaacttaaagtataattaaaaataaataaataaataaataaataaataaataaataaataaaaaagaagatctaactttcctaaatatctatgcatccaacacagcagcacccagattcataaaagaaatttgtaaagaccttcaaagagacttagactcccatacaataatagtgggagactttaataccccacttacaatagtagacagatcatcaagacagaaaattgactaagataatcaggacctgaactcagcacgatagatatctacagaactctccacacccccaaaccagaatttacattcatctcatcaccacatggcacatgctctaaattcaatcacataattggaagcaaaagactcctcagcaaattcagtttgttacaactgaaattggcacaaaccactctctgaccacagcataatcaaattagaaatcgagactaagaaactcacttaaactcatacaattacatggaaattaaacaacctgctcctgaatgacatcagggtaaataatgaaattaaggcagaaaataagaagttattacaagctaatgggagcaaagatacaacatgccggaatctccgggacacagctaagggggtattaagaggaaaatatatagcactaaatgtccacatcacattagttgtgatgacctaacatcacaactaaaagaactagagaacgaagagcaaacaaaccccgaagctagcagaatacaagaaagaaccaaaatctgagctgaactgaaggagattgggttccttcacacacaaaaaaatcattcaaaagatcagcaaatccaggagctggttttttgaaaaaaataataaaatagactgctagctagactaattgaaaaaagagaagactcgaataaacacaatcacgaatgacacggggaatattaccattgaccccagagaaatacaaacaaccatcagagaatataatgaacccgtgtatgcacataaactagaaaatctaaaagaaatgggtaaattctcagacacgtgcagcctcccaagactgaaccaggatgaaattgaattcctcaacagaccaataatgagcctgaaattggttcaacgtacacaaatcaataaacagattcatcacataaacagaactaaaacaaaaaaccacatgattatattaatgatgcagaaaagccttctgataaaatttaacatcacttcttgttaaaaactctaattaaactaggtattgaaggaacatacttcaaaataataagagccatttatgacaagcccacagccaacatcatgctgaatgggcaaaagctgaaagcaatccacttgaaaactggcacaagaatgccctctctcaccactcctattcaacagtattggaaatactaggcagggcaattgggcaagagaaaaaaataaggcgtattcaaataggaagagaggaagtcaaactatctttgctgcagatgaaatgatcctgtatctagaaaacatcaacccaaacatcaacctgagatcttcttaagctgataaacaacatcagcaaagactcaagatacaaaataaatgtgcaaaaatcactagcatttatataccaataacagtcaagttgagagccaaatcaggaatgcaatctcatttacagtttacacacacacacacaaacacacacacacaatacctaggaatacagctaactaggagggtggacaatttcttcaaggagaactataaaacactgctcaaaaaattagagatgacacaaacagatggaaaaatattccatgatcatgaataggaagaatcaatatcttaaaaatggccatagtgctcaaagccatttatagattcagtaatatttgtattaagttatcattgagattcttcacagaactagaagaatcatatggaaccaaaagttttaaatttaaaaattcatatggaacccaaaaagagctcaaatagtcaaggcaagcctaagcaaaaacaaaaaccgaaaaccaaagctggaggcattatgttacctgacttcaaactatactacagggctacagtaaccaaaacagcatggtactggtacaaaaacaaacacatagaccaatggaacagaatagaaaacccacaaataaaaccacacacctacaactatctgatctttaggaaacctgacaaaaaaaaagtgatggggaaaggattccctattcaacaaactgtgctgggataactggctatccatatgcagacaattgaaactggaccccttccttacaccatatacaaaaaaactaactcaggatggattgattgatggatgtaaaacctaaaactataaaaacctggaagacaacctagacaatacattcaggacacaggcacgggcaaagattttatgactaaaatgccaaaagaaattgcaacaaaagcaaaaattgacaaatgagatctaattaaaccaaagggtttctgcactgcaaaagaaactgtaaacagagtaaactgacaatctacagactgggagaaagtttttgcaaactgtgcatctaacaaaggtctactctccagtatctttaaggaacttaaaccaatttacaagaagaaaacaaacaaccacattaaaatgtgggcaaacgacatgaacacacgcttttcaaaagaagacatacatgtggccaacaatcatataaaaaaagctcaacatcactgatcatgagagaaatgcaaatcaaaaccacaatgagataccatctgatacctgtcagaatggctattattaaaaagtcaagggacacatgttctcaggacctcctgagtgctgatcactcatatttggctcagaaaaatctcttctaatatattacagagtttgactctttttgtccacaataatttggtgcctgaacacgtgaggcctcagataagactcaggaccccaaaggagttgtctcaacctggagctaaggtaccagcaggggcccactgaaagcctccaggattttgagcttcttctctgccagaagtggtaagtcctcctgagccccgacctccctttggttgacggccctttatttattctgatctactatttctttttctttctaggaagttgttgtttaaggatcctacttctagttgggagatacattctaaagggtcttctccattgcttttctccccaaattaatctcgatttggcttgtctgttcacatttgcatgaggaactgaactgttgttttcatagggaaacgagagactgtgtttcctcagcttaaaaaagaaagggcattttgctcctcccagccaaaatgtgggaagtgatgaggggtgcttgtgggaatgtctgggggtggatggaccccatcgtgatgtgagtggcctacagggaacacccaacaaaatgagttttaaaaaggcttgtccaggaagcacatatgggagctggtcactctgcattttgggccctcctggaggtgtttagaccttccgagagagaaactgagacacatgagagggaagaaatgactcagtggtgagaccctgtggagtcccacccacaaccagcacactgtgacccactgcacaaacctctagcccacagctcacttcctcctttaagaagagaagagaaaagaggagaggagaggaggaacagaaaagaaaagaaaagaaaaagtgggaaacaaataatctaagaatgaggagaaagcaagaagagtgacccccttgtgggcactccattggttttatggcgcctctactttctggagtttgtgtaaaacaaaaatattatggtctttgtgcacatttacatcaaggtaagagagccctaatggcggcttgcacgctatagagttcctaagttctctctttctctattttcttttctgcctgctttacatctgctgttacctttctactgagataaaaaccactgtttagatccaaattttttttgcaagctggtaaatttatattaatatctcatggctagagttttgaagtaaaagctacaggatgtctgtgtgtgtgtgtgtgtgtgtgtgtgtgtgtgtgtggtgtgtgtgtgtttaaaagcctttatgatagatttgtataattttatgtttaattggcagtgaacccattttaatttccctctaacacaccagacttcttcctctgtactttgagatgtaagttttgctgattttttctcctaaaaagtgtttcctgtaacatggaaatttagggttatttagctgacaactgcctggggtaaggaaacaggttatgaagagtttgaaagggttgggcgtggtggctcacacttgtattcccagcactttgggaagctgaggtaggtgactcatgtgagatcaggagttcaagaccagcctggccaacatggtgaatccctgtctctactaaaaatgcaaaacttagccaggcagtagtggcacactcgtaatcccagctacttgggagactgagacaggagaatcacttcagcatgggagatgtaggttgcagtgagctgggatcatgccactgcattccagtctgggtgacagagtgagcccctgcctcaaaaaaaaaaaaaaagaaaaaaagaaaaaaagaaaaaaaaagagtttgaaagtttgagatagaaaaaaaagaggttttttgaatctataagatgtacttctatcagcatgcctaatgcgtccatgaatctgtgtgtggtgtacataatgtttcactactaaaaatatacaaaagagctctaattaattggcttaaagagaataaaagtgcttaaatcaaatactttatcaggacaagatgcttcttcaagttcacttaagtaaaatctttaataaataagctggctttaaaattattggtaaaataagattagaaatgtcttaagaattgttagcgtttttgtttgcacttattgcacaagtggttttgtgcttatccctgcagaatagtataagattttccataagggttataaaactataaacctggccgggcacggtggctcacgcctgtaaccccagcactttgggaggccgaggctggtggatcacctgaggttgggagttcaagagcagcctgacacacacaaaacaaaattataaacccagcccaaaacagaatgatctttgcttgtataatttttaataaataagccatgtaatattgttggttaaataaaaacagctaactactgagatattggttaaaaaaaataactttatatttaaccataagttcccttacttaggtaaacacctgaaattcatagtttataacattggttaacagggaattaactttaagtgatgactgtcacagtgttcataaataatctaggtaaactattaaataagtttatcaagtaaatgcaatggaataaatgcctataaacaaacttgtcacataatttacaatctaaagttatattaaataatagatattaattgattagctgggtaatttataatttaaaaattacaggaaaacatttttaaaaaacaattcttattaaaagataaatatctgtgtttaattcaaagcttttttaaaagttatgtataaaacaagataaatggaaacaggaaataagagatgtaaagacagttataaatataaagaggaattttggtaaaaaagatgaaaaggaaagtaattttacacaagaaagtcttatgtagtgaatttttgtcctgaaataaaataactgatagttcaagaaagagggatatttaggacaaaacaggcagtttaagcatgttgtaagtggtctctgtaagtcacaataagactttttttaaaaaaagaaaggtagtgtaatgtagttggttatgattaagaaatataatagtcattctacagatgggtctttgatatttaaaaaacacaccctaatccaaaactaaataattggttaaaacaaggttttagtaaaatattaacttattcttaatgcaaaaagtttttaatttttaaattctataatctgtctttttgaaattcttccaatgaatatatcaaagttcagctttttctcttttgaaaggccttggatgatagctctctccttcaccttgtgttggcttctgtaacttttattaattatctaaagtaagagaggaatttttatttaaaaacagaaaaatgaaatatcctttagacctgctttttttcttctgtatgcctgttatatctgtatcttcatatgtgttatctggaagtgatatttcactaccaaactacatgaaacagctcatcagttgtcttttttaaaaaaaagtaagtgcttatcagattggcagacactagctaagatgcctttgaattcacctgattttaatatttagtaaaattaatttagtaaatttaatcttaaaactctctccagtaattagagctatgttatgttaaacctcgttttttttttttcacttgaaatttgggttactaaattaaaatagtaggagtataaaatgtttttggtgatgcatataaaacacaaggatataggttttgcaaaaaaaaaagtaggtttttttctagttaagaaactatttaagagttgctttaaaatgaagaaaaaattacggagataaaactaaataaaaagaacaatttagccaggacaacaaaagttaactctgagacctgtgattaccaagaagatagttgatatagaggaagggcaaaaacaagtaactattaaaaccagagggtataatgcaaaggaattgttctgctttttagattgttataatcagtttcttaaaaataatctatgtggtagattgtaaaaaataaccactttaagggccaaattcttaattttttttttgagatggagtcttgctctgttgcccaggctggatggagtgcagtggcgtgatttcggctcactgcaagctctgcctcccaggttcacgcccacattcttaattttaaatgcttcagaatttaagagcttgtttggattgatgcaggacccgtagctcactattaaacaatcactaatgagtatatgagatccaaatgcacaggaggttattccagagagaacaaccagcttagtggaccagacaaacgccactgaaaggtctgttggccctgagaaggggactagccaactctccctataaaacaccaagtgcagcatcccagatgaagcagtgaatatgctttgtatgcgagccaggtggggctggtgtatgaagcatatgaaccaagtaaccattaaaatcaatcaaccgttggtggacacttagtttggtttcatgtctgtgctgttgtgaatagtgctgcaacaaacataatgagtgcagttgtcttatttatttatttattttttattttttgagatggagtttcattcttgttgcccaggctggagtgcaatggtgccatctctgctcactgcaacctccggctcctgggttcaagcgattctcctgccttagcctcccaagtagctgggattacaggtgctcgccaccatgcctagctaattttttgtatttttagtagagacagggtttcaccat[138 bp omitted]taccatgtaatgggattgctaagtgaaatggtagttctatttttagttgagatagctccatattattttccatagaagataaactcatttacattcctaccaaccatgtatcttgctaacatctgttggttctgacttcttaaaagtagccattttgactggtgtaagttgatactcagtgtggttttaagttgaatttctctgatgattaatgatgttgagcattttttaatgtgtttgttggccacttatatttcttgttttgagaaatgtctgttgatggtctttactcagttttccataaagttgtctgtgttttttgttttttttttttcatgttgaattctttgacttccttgcagattctggacattagtcttttgttggaggcataatttgcaaatattttcttccattgtgtaggttgtctgttcattctgttgattgtttcttttgctgtgcagtagcttttaattttaatcatgtctcatttgtctattcgggggtttgttgcatttttaagggtctttaccataagttctttgcctggactaatgtccagaagggtttttcctaaattttgctttaggaattacatagtttcaggtctcacattgaggtctttaattcatcttgagttgatttttgtacatggtgggagataaaggtccagttttattcttttgcatatggctacccagtttttccagcatcctttattgaatagggtgtcctttccccattgtttactttgttgactttagcaaagctcagtatgttgtaggcatgtatctttatttctagtttctctattctgttcccttgatgtctgtgtatatttttgtactagtaaatgctgtcttagttactatggccttatagtataacttgaaatcaggcaatgtgatgcctcctgttttgttctttttgcatagaagtgttttagctgttcaggctggtttttggttccaaatgaatttaaaaattgctttttctctaattctgttaaagaaatgacatttgtaatttaataggaattgtgttgaatctgtagtatgctttgggcaatatggtcattttaacaatattgattcttcccatttgtgagcaaggaatatttttctatttggttgtgttgcctacagttcctttcatcagccttttgtcactctctgtgtagaggtctttcacctccttggttaaatatactcctcagtgtgtgtttgtgtttgtgtgtccttaatttgattctcagcttgaacggtactgatgtatagaaaagctactgatttttgtagcttgatttttttatccagagactttactgaagtcacttaccaagtctacgagtcttctggaagaatcttcagggttttctgggtatatgatcgtgtcatcagcacacacagataatttcactttctcttttccaatgtggatgcactttctttctttctgttgcctgattgctctggctaggacttccagtactgtgttgaataggagtggtgagagtggacatccttatcctgttccatttcttggggaaatgctttcacttctccccattcaattttaaggttggctgtgcgtttgtcttataaggctcttattttggggtatgtttctttcatgcctagtctgttgagggattttatcatgaagggatattggactttctcgaacgctttatctgcatctattgagatgaccatatgctttttgttcttagtttatgtcatgagtcacttttattgacttgcatatattgaaccatcctttcatccctggaatcaagccaacttgatcatgatgaattatgtttttgatacactgttagattccgtttaatagcattttcttgaggatttttgcacctgtgttcctcaggtttcttggcctgtagctttatttttctgttggatccctgtctgattttgctatcagggtgatattggtttcatagaatgagctaggaaagaatcccatcgccttgattttttggaatactttcattatgattggcaccagctcttcgttgtgtatatggcaaatttcgactgtgaatccatctgttcttgggcttttttgccggaagatttttagtactgattctttttggttacttgttattggtctgtttagggtttctattttttgcctgtgcgatcttaggaagttgtatgtgtctaggaattcatccatttctctaggttttctagtttacgtgcataaaggtgttcatagtagtctctgatggtcatttgtatttctgtggcgttggttgtaatgtcaactttatcatttctgattgtgcttatttaaatcttctcctttttttggttagtgtagtcagccatctctcaattttatttatactttcaaaaaaccaacgttttctttcactgattctttgtaatgtttttgtctcaatctcattctttatctgtcctttcagagtttccattgttttcagcatccatcactagcaagccagtgcgatcctttggtggtgccacaatattcagatttttcacagcgtcagaatccttacactgattccttctcttctggagaggcctccacttactctcttcgaatttattttcatttggatgggatttgttttgcacattttcccccggccccgcagggagggtgactgtagagcatgttgggaagggtcttttggcttttcccatggctttgggagcttctgcagcagggtttgtgttgggctgtgcagctcaaattgcaggccaggagctggtgcttaagggtaagagccaccctcggcacaagcaggtggatatggacctggtgtgtttcctgtgaggtgctgactgttgtttcaggggaagggctggaccgtggagtgtcaggtgccctgagctttgtgttccacaggggcgagggaacacccctgggcagagctggaacccccggcttgcccacagatatcccagtgatgagtgcaggcactagtcctgatggacatggctggagcagctcctagtgaaatgccctgaggtctctgcggggggtgaaggagctacaccgtttccagtcccatagggaggaacgttgtctgtctccctatcacacccgtgctccagggctcatgagtctcagttcagacacacacttttgtctctccccaggccacagtgtggctgagggccgtgggaaacacctgccttgccactctctgcaggcgtggttccaaggcagagcctcctccctcagcccagtgcagaccctgagcggctgtctgttgtctgacgtggtagctgcttcatgtaggtgggatgtggggcttctgcctctctggatgggagagtggacgtcagttgtggtggtgttgctggctgggtgggcccgacctcaggccctggggtgagtggtcaggtgccagcagggtaggaaagggcaggtagttcccggatcacaggcccctaggtggccggctggacagcgtgtgtgagtcctgaaggggctggactgggttttggctgctccggggttcagatgctggctgtgatggggagggatgggctggtccccagggcacaggcagaaccctcaggcggggcaggcagaaggctcaggtggtagagcctgcggcagatcacagacctgtggggactgggctctcagaagggctgggggctgcagctgaaatgtccaggtgggggcagggtggctgtgctgtgggcctgtcactagggagggcagggcccctctgctggggcactggagactggcagctgtgaggcacagggcccgctcacacttccctcctgaagaagtgtcactcggttttgctctggggacacgtgaaagtgccaggcctccccacaccctccctgggcctggggcagcagggacagaggcagaggtggcagtgactgcaaagggcttgtcaggggcctctgagcattggactttcagagggcactgagccagggccacggtgttcgggtgggggcaggacgggtgactggggccctgcagctggcaagccccattagcaggaaggaagccccatttcgcaggaagcaacagaggtgggcagctgtgtggtgctcagcttggctgctcctgtgccccagctgtcatacttattctggggcccacagaggtgcctggcctcctccctccctgctaaggcagtggcagctggacccaggctgctcagggatcagaagcctgtgggattccacgtgggctccagaggcgcctctgcaccatctctgggaactccctgtgcctctgtaggccaaggggggtcaggggctctcctgtgaccaggattgtaaagggccaagacaggggtgtggatcccaggggcctcacacccactcaatctttccctttgttaaggagcctctcactcactcaccccttccccgtgttagggagcctcgcactcactcaccccttccccgtgttagggaccctctcactcaccccttccccgtgttagggagcctcgcactcactcaccccttccccgggttagggagcctcgcactcactcaccccttccccatgttagggaatctctcactcactcaccccttccccgtgttagggaccctctcactcactcaccccttccccgtgttagggactctttcattcactcaccccttccccatgttaggagcctctcactcactcaccccttccccgtgttagagaatctctcactcactcaccccttccccgtgttagagaatctctcactcactcaccccttccccgtgttaggagcctctcctggctcccaccttttctcttctcttctttccatgtcctcatgtttctcaggtgaaccccagcatcctcttggaagatccacttgacctgttggtatttactcactattttgggtcctcttagtgagtaggcagactccagccctttccattcagccaacttgaacctcagcccacaatcattttcttgtcactttttactcttgggaaatccggtcccaatgtgcttgtctttcatttgagaataattttcattttctccagtagttttaaaattactttgtatctattctaggtatcttttactctatcatagttaagacattgatgttatttattaatttgttcacattaaactcatgttctttcttcatttctgtaaaaatgtcaaccattttctttgcaatatttactgaataacgtactccttatttccttcattctgaaagtgtgatccatagagagatacctgtttcctcttctcattccatttcttgtgtgcattaattatgttttctactttattcatttctagtttttctctgatgactaatgaaaaatttaatagatattccacaccaatactatgctcatcatttcagctgtgtcttgttcttgatgcaattatttctaaatgtgttgatatgatttactatttttcacctcacagtagcttcctaattcatttctataattgcctgttttttctgtaatggactttttgatttttatttctcttgggtgggtttttctcccacacatgtgatcttccatacagtttctccccgggctgactcaggaaggaaagctgatgaggagcattgctgtggtcactcctgccctgcggtgtccatgctgccaagcttagaatcagctctgtgttctgtccggcatggtggggcccatgtgagcctcacactcacgtgctagagatgcctggtccagcagtgataaagcgcatctgtgtcatgcacacccgggaaggtggctcaatgctgagtgtggcccgggtcactgaggggagctatcccagggtctgtccacaaacacagaagagggagaacaacagtctctctagggtcccacggtttcctccattttttgctttgttctgagagagagacaaagtgccatggctgctctgtgggttggacagatgcatgctttcacctgcaggctggaacccaagctgaggtcttcagcatccccaagtactgataaagcactttaggttgtttttagaaaacactgaaaaattaacccttttgctaaagaggtagaaacaagccctcccctcaacgaaattcctgaaactctcaggttaaacttcgtaacccaatcccttcactgcagacacccaataggaaagtcacatgtgcaaggatgagatgactttggtcaagctcagaccccacagggccaggaaggcctgaaggagaggaggcccatgcttccagctctcagataagagctgcttctaaggactttttaaaaaccccacaagaaacccttccatgtccttcaccccctcctgctttgacgaggtttatcactagatattctttaggatgtcaggaattcagataagatgctctcgagaaaaaacttgcccagcaacggcatctcctccaatggactgacagcaactctggctttgaacctctggaatcagggaactctgtttctaagcagctctgtcagcctctctcttgttgctgataagaacttcctttacttctgtatgtcagagagctctctctatggtgcttttcctctactctcacaccacaggaatcatcctcacagaagaagacttctaggaccagatgtgtgggattttttttcctagacccagtagcggacgccagctgagtgtttaaatgcttcttccccagtgccgtaaacaaatagcacttgaacataaatttaatttactcagcaagaccatttttattttctgcagcaagggtacactcaccagcagttttgcttcgagagtacacaaaacaaaagagacagggtcatttataacctgacacgtccaccctactgctctgtccggtttccactggctggaacaggacctcacactctgtatttgtcccgattggctagtaacttagaacttctgaaaagaggcaaaggtagagcagaacaaaggaaggaggaagtaacttgtggaatgctgagaaaggtgaaaacaccttcaaataaggaagaggaacaggctatgacctaatgcttgcttggaccagtataagcatgccagggcaaatatttaggctaaattgtgggagctaataacataaagtacattgatttatttatcacggctagcagatatttgagaatgttagcatagctctgacactgtctacccagagacagtcccagatcccacagattgaatggttcagtccccaacactgcccccacaccattcccaagtccagacctccagaacttctgactgactggcttcaagttggggaccctatgaccacctctttgggtttgattaatttgctgtagcagctcacagaactcagagagacactgacgtttcctggttgaatacaaagcacactgcagaggacacagatgaagagactcataggaggaggcatgggggaaggggcgcagggcttccataccctccctgggcatcaccctccaggagtctccacatgctcaaccacccagaaacccacgaaacccagtcttcttgggtttttatgaagcttcatgatgtcagtatttcctcccacaaggaacaggctgagaccatcttctgggagggtcttaagagccaccatcagaaaggcagggacattagagtcttgccttgggcaggtgaaggaagggcaggaggaggtcagaggcctcccctaaggcctaacacagccaatgttataacaaaagactgtaacaagggctatggagctatgagccaggaaccgcaggtgaaaaccagtgtgtatcacaacatcacacttccctctccggacacactgtggcttgccatgccatgcactccagattgtaatccttgcttctcactcccaaataaactcaaaatccagacaaccctggagcaacgcagccttgaattcctggggtctcttatatgcacacttttttcaaccaaacgggggtcaaaactgtagcatttgtgggatgcaagacttgtgtatatgaacggcagacttttcctatatgcaggcccagcagagacaatgtcggggctggagtacgagcaggtgttggtgcatgtagcgggtactgaaacgaattgcctgtgtatcccaagaaacaactctactgagagatcatattctctaggggtttatttttgtttttatttttattttaagttaaagcttcgggtagaacacccagtgtctccttgtccatctgaagaagatgctgctatgtggaagcacatccttgagatccacaaggagacactgggcaaggagacgagggtgccccactgtgcagaagtctccctaataaatgatctatgaacaccctggtgtttagtgcttctttctttggaatcccagcagctctgtcactggacggtttggtgcactcccttgagggaattcccctgggctgcttggggtccactccagcctcaggtgtagctggaggacgcagcctcccaccttggtctggagccctgagcccctcactgtcattgcagatcccgaggttcctctcctggctccactcagtggtggaaacctccaccctaatgagcccttgatggtcccaggtccctgtggcatctcacctgtggcctctgttctttcctgtggatccatctacacttgggaacttccacatctctttttctgctcatgacattgatgctctgggtatttcagaaatgcccagatagatggacaaatacacgtccatctatccattagggtcagatgtgagatccagagtggacacatcaatcacctacgtagactgtggagtccaacgccaagatcctcttatgtcccaaacacctcaggtcttaccctggtctggaaatcaggcacaaatgagcccctcctaatgttccagcaccactgaccgtacaaccactgtcacgagtgggatttgtgacaacagtcggcaaaggaagaatctgaggctcagagatggttcattaccgcccgaggtcacgtaggcagtggatgataaccagtcgttgaataaatataactcccccccaactccccaaatcaaagctcaaatataagtcattgttcccaaagcgttgaacagggattgaggtgcagagggacggccaagtaagcaaagggcaccgaggaggcaggaaagactcagagatttgttcccggggggtggggttggacactgtagcaaaatattttaaaaaggggaagttaagaggggactatttggttgaaagaaaacccacaatccagtgtcaagaaagaagtcaacttttcttccctatttccctgcatttctcttctgtgctcactgccacacgcagctcagcctgggcggcacagccagatgcgagatgcgtctctgctgatctgagtctgcctgcagcatggacctgggtcttccctgaagcatctccagggctggagggacgactgccatggtaaggaccccacaacactgagctgatggacggctgaaggagggagggtgaccatgtgggaggctgtgagaaggaaggagatgcctccgctaccctcgtcaggaagggcagacacaggaaggaaccagttttatttgctgctacatcctggctctcagtgggatgaaaacaaaccagacagacggtggctgggggtcaggaaagggcccattaccatctgaaatgatgcagagggcctagtgactgcccccacctcagccctaatggaatgagagcaagggtcctggggagggcagttccacttcctgtgtggctgcagatgacagcaccccatgagaagaaggacccagcctccgattggccacactctgtgtgtctctctatcctgccagcaccgagggctcatccatccacagagcagggcagtgggaggagacgccatgacccccatcctcacggtcctgatctgtctcggtgagatttgaagaaggaggggagcttctaacctaagagggacctcaccccacagccaaactcttgtccctaaggagaccccaggggctcacaaagatcccagggaggggaggacctgcccaggcttcagggggcaaatccctcaccgggaactctcttccagggctgagtctgggcccccggacccacgtgcaggcaggtgagtctgtccccagctcttccaggtccctcctcctcactggggacaaggggccacccccgtgccgctggggatggggaatagcagttctgggctgactgatgggggcgtctggagggtcctgggctgagagctggaatctgctgggttgggtgggaaatgagttagaatctgactcctgatttccttccagggcacctccccaagcccaccctctgggctgaaccaggctctgtgatcacccaggggagtcctgtgaccctcaggtgtcaggggggccaggagacccaggagtaccgtctatatagagaaaagaaaacagcaccctggattacacggatcccacaggagcttgtgaagaagggccagttccccatcccatccatcacctgggaacacacagggcggtatcgctgttactatggtagcgacactgcaggccgctcagagagcagtgaccccctggagctggtggtgacaggtgagctgacactcaggggtcccagccccagactctgccctcaggaagggggacggctctcaggggcttctccctctcacagcccagccctggggatgacgcgggtggtctgagccacatttaacacggtgcctccttctctcctaggagcctacatcaaacccaccctctcagcccagcccagccccgtggtgaactcaggagggaatgtaaccctccagtgtgactcacaggtggcatttgatggcttcattctgtgtaaggaaggagaagatgaacacccacaatgcctgaactcccagccccatgcccgtgggtcgtcccgcgccatcttctccgtgggccccgtgagcccgagtcgcaggtggtggtacaggtgctatgcttatgactcgaactctccctatgagtggtctctacccagtgatctcctggagctcctggtcctaggtgagaaattcacagcattgcctggagttccctgagtctccaggcaggtggggagcagccgcgtctcagggcagttccaggtgggatgatgttggggcgagagggctcagggctcctggggccagagacacaggaagatcagcagtgatgtggccccgggggaaagggaagatttgtggggaagcctgagggtcggctcctggaaaccatgaccaccttttcccaggtgtttctaagaagccatcactctcagtgcagccaggtcctatcgtggcccctgaggagaccctgactctgcagtgtggctctgatgctggctacaacagatttgttctgtataaggacggggaacgtgacttccttcagctcgctggcgcacagccccaggctgggctctcccaggccaacttcaccctgggccctgtgagccgctcctacgggggccagtacagatgctacggtgcacacaacctctcctccgagtggtcggcccccagcgaccccctggacatcctgatcgcaggtgaggagcccagcgggttcagtcagggacccaggctccgcacaggccctgccgggggagctcaggtagtgatggccgggatgagggatgggggtcccaagggagggagagacagacagagacaggggatgggcggggagggggagactcagagaaaacagagacagagacactgagggtcccagagggagacctggggaggtgtcagctcagagcaaggtggggcagcccctcgcccatccttcttctctccaggacagttctatgacagagtctccctctcggtgcagccgggccccacggtggcctcaggagagaacgtgaccctgctgtgtcagtcacagggatggatgcaaactttccttctgaccaaggagggggcagctgatgacccatggcgtctaagatcaacgtaccaatctcaaaaataccaggctgaattccccatgggtcctgtgacctcagcccatgcggggacctacaggtgctacggctcacagagctccaaaccctacctgctgactcaccccagtgaccccctggagctcgtggtctcaggtgggggccttgaccctgtcctctctgagctcaaagtctcagctcagaccctgccccaggagagctctgggctgggatggagtgagcgggggtctgagaggggctcagccagtgggagactcaccctcagagggaaggaggagaacagggccctcccaggcctgcccaccctcagtggcatcgccagcatcatggacaggagaggcgggtggagggaggggcctggggaggccacaggtcccatgtagagaaatttggtttgaggtggagacttcaggaaagccccagctcctcagcctcctctcattcttttacccaggaccgtctgggggccccagctccccgacaacaggccccacctccacatctggtgagtccctgaggcttctgaactcaagggagtgcggcctcccccagggcagccctgggtctcccagagaatcccattcccctcaaagactcgagcttccctccagggagccgggcagagccagaggaggggccacagggtccccagggctctgaggctgggctggtgaggggtggggggtcaaggcagagagaaatgttggggcccagcctgggggaggagcagccgggctgatgtggggagcagggcagccccagccctcacctccccgtcctgacccagcaggccctgaggaccagcccctcacccccaccgggtcggatccccagagtggtgagtgacgggctctgagtgggaggtgggcagggtccaggggaggcaggggtgggttctgtcctaggttcagtctcctctggaggtggtgatatagacaggctcctcccctgcttgggcctcagtttctccaaatgtaaaggtgagaggcctgcgggtgggaaagttcctttcagctctgactcccagctgtgacctcctgggagaggaggcctcccagggaacctcccagacccgattccgcgggggcctgtcccgtcccacctgcagcagagacggtgacctggggcaggggaggggagaagagtcatggttcaggacggtcaggctctttccctgcagctccggggctcggctctggtgcaggaacaagggctgcaggtcagactcctgggcttccttcccagctctgccgcttcctggctgggggccccgggcaggcgattcccctctctgagcgtcagtttttcatctgtacagtgggtggggtggatgtttctgtgctgcacgactgttgtgggggttggaggtggtgaacagaaggtccagcagtcacctgcacacagtaggcgctcatttcaatgacatcacccccatccctgacatcatcgtgctcaaggtctgggaaggcacctgggggttgtgatcggcatcttggtggccgtcatcctactgctcctcctcctcctcctcctcttcctcatcctccgacatcgacgtcagggcaaacactggacatcgagtgagtagggaatggggggaccctgagggctgaccgagggtgggctcagggcacagccaaagagaatccaaaccactgggcaaatgcagctttgagaaactgttccagcatttctcaccaggccaatcgacagtcagtcccatctacaaatgtaaagtgtccttcgggctcagtgccatctacaaatgtaaagtgtccttcgggctctgtccatcctatgaggcatttggaacatggaggcaggagtgtttttaggtttccttccttaccttcgagctgtgtgtgcagggcagggggctccaatgttcccagggctgaggctctgtccttcttcccccagcccagagaaaggctgatttccaacatcctgcaggggctgtggggccagagcccacagacagaggcctgcagtggaggtaattctgcccgaagaccccagactcccacctgctcgtggcccatacactgcccctaaagctcccattcttcccccaggtccagcccagctgccgatgcccaggaagaaaacctctgtgagtgagaggaagaggtgaccagccaggagggagatgggggccccgaagtttccgtagcaatggggaaaggggcgctggctggaaagggtctggggctcagggtgagatcatctcaccccacactgtggggcctcagggacatcgcagcccctccctgcatctcagtggccccatctgggagctgagcaggggctggcaggactcagaggtcccagggaaccttcccaagagacaaaccccttgctctgccccagcagatgctgccgtgaagcacacacagcctgaggatggggtggagatggacactcgggtgagaccccacccctgtcccaggcaccaaaggcctcctggtgccagatctaatcctgcagaacttctctgtcctccttcccccggctctcagcatcgtcacggtggacccctccttgtccagcacgctgcctcccgcctgctgcgacctcactctctcctgctgtcctgggacctcgtgggcctcctcccgggtccccttcctgctcctcatcctctgtttggccgtctggttgttagagctctccccaggcctcaggaggatgaggaataaatgaaccaccccggtcccccaggctccccttcattcattcaaccagcaagtgttcccagggagctcactgtggatggggctccccatgggagctgcagacacagcagggaggaaagccgcccccgcctcctgagctcacctcgtggtgggagacaaaatgcaaataaatgtgccgcctccaggagtgcaacgtgctgtaaggaacataaaccagagaaagggcagagagtgtggggcagtggggccagtctgaatggaaggggagggctgtctgctcagctgtcatctgagaagcctggacagagtggggcacacgatcctctgatggacgagcccctgcaggcagaggaaacaaccctgcaaaggcccccaggcagcagcgagctcttgcaggaaggcccgtgaggctgcagccaaatgggcaacgtcagagtgaggagcagaggccagaaccacagcgagggagcggccagaccctccacggccttagggcgtccctgagattccatcgggaaagggatgtaatcggatcacccggggaacagtgaggaaaattgactccagggggtcaggaggattcaaggacaccccccaccactgtctctctccagcagagcccacacgatgaagacccccaggcagtgacgtatgccgaggtgaaacactccagacctaggagagaaatggcctctcctccttccccactgtctggggaattcctggacacaaaggacagacaggcggaagaggacaggcagatggacactgaggtgagtcctttcctctccaggcccccaggcctcccccacccccaccacgttccttccctctcactctcccccgctgcaggctgctgcatctgaagccccccaggatgtgacctacgcccagctgcacagcttgaccctcagacgggaggcaactgagcctcctccatcccaggaagggccctctccagctgtgcccagcatctacgccactctggccatccactagcccagggggggacgcagaccccacactccatggagtctggaatgcatgggagctgcccccccagtggacaccattggaccccacccagcctggatctaccccaggagactctgggaacttttaggggtcactcaattctgcagtataaataactaatgtctctacaattttgaaataaagcaacagacttctcaataatcaatgaagtagctgagaaaactaagtcagaaagtgcattaaactgaatcacaatgtaaatattacacatcaagcgatgaaactggaaaactacaagccacgaatgaatgaattaggaaagaaaaaaagtaggaaatgaatgatcttggctttcctataagaaatttagggcagggcacggtggctcacgcctgtaattccagcactttgggaggccgaggcgggcagatcacgagttcaggagatcgagaccatcttggccaacatggtgaaaccctgtctctcctaaaaatacaaaaattagctggatgtggtggcagtgcctgtaatcccagctatttgggaggctgaggcaggagaatcgcttgaaccagggagtcagaggtttcagtgagccaagatcgcaccactgctctccagcctggcgacagagggagactccatctcaaattaaaaaaaaaaaaaaaaaagaaagaaaaagagaaaaaagaaatttagaagaataacaagttattccaaatgaaggcgtaagaaagggaataataacaataataagaggagttgttcatgaggaaaaaccaaagcttgaaaattcaacaaagccagtgaagctcattcttgaaaacatgaatcacactcatgaattctaactacaatgaaaaagagaaagaaagagcaggcatgcatttccatatgggagtgagccagcagacagccctacagatcgtacacacgttttccaaaactaacaatggaacaggcggcaaacctatgccaatatactagaaattgcagattaaatagatgaaatattctaaactggagtttacataatgaacataagagtaatcagagaatctgactcattttagatgtgtgtgtgtgtgtatatatatgtgtgtgtgtgtgaaaaacattgactataataaaaataatctcgagttcacgaagcttcattggtgatttcttacaaatattgacacactaatgaaacacacaaacacacccagagcatcacaaatgtttcttgagaatagaaaaagtggcaatgtgcccaggtgcggtggctcacgcctgtaatctcaacacatagggtggcagaggcggcagattacttgaggctgggagttcaagaccagcctggccaacacggcaaaaccccatctctactaaaaatacaaaaattagtcggacatggtggcgcacactgcagtcccagctacttgggaggcagaggcaggagaatcacttgatcccaggagatggaggctgcagtgagctgagatcccgcccctgcgctccagcctggtcaacagagccagactctgtctcaaaaaattaaaaaaaaaaaaagtcatgacatataaaatagaattttccattctataacaggcatattttaaactctacagtttttctgtttcaaaataatatttttttaaattttattttaatgttttactttattttatttggcagtttaaaattctacatatttaggatgtgcaacatggtattttaatatgcctgtgaaatcgctaggtcaagctaattaacatctgtaacatcacgtagttatctttctgttaagagaacatttaaaatccactttcttaccaattttcgcgtatgcaatccattgttagcaactgtagtcaccatactgtacaacagatctcctaaacttactcctcctgtccaactgaagtgcggtatccttcgatgcagctctctgattccaccccagcccagctcccggggaccaccttctactctctacttccatgagttcaactggggcaatccgcacataagtgagatcaggcagcaggtgtcttcccgtgccttctttattccgcgtagcgtgacgtcctctaggctcgtccatgttgtcacaaatgaaacaatttccttcttctagaaggcggaatagtttttcgctgtgtttatactgagcgcttcattttctgtatccattcgcctgctgatggacgcttggccgggttccatgtcttggttatggtggctaaagctgtcatgaacatgggagggcgggcatctcttcaacgtactgattccatttcctttagatacacacccagcagtgaaattgttgaaacacagggtagctctgatcattaacttctgaaaaacatctatagtatttttgtggtcattgtactcatttacattaccactagcggagggcagcggttctattttttctacattctcgctaacacttgttattctactctttttcatagtaaccatcctaacagatgtgaggttatagcttcttaaagtttatatgtatgtaagtatatgcctatatgtatatatgcaaatgtatgtattcatacataaacatccatacgtacatatgtgcagatacgtatgtacatatatatgcatgtgtattgtatgtatatatgtatacacaggtatacacatatatgtgtagaaagtgaaattttgcagtgagatatcacctcacagctgttagattgcctattatcagaatggtgaaagatcagtgttggtgagcatgaggagaaaaaatccttacacaccattggtggacatgtaaattaacacagccattttagaaaacagtatggaagctcctcaaaaaactaaacatgccaccaccatataatccagcaagcccactgctgggtgtataccagaagaaatgaaatcggccacagaagagacgtccacactcctaagctcattgcagcactattcacaattgccaagttacaaaaacaattctatatttttgaaaaaggattcatttctcctgtccctgtagagaaaacgggctcaaattacacattagctgagctctgagtactcactcatgtgtgtatctatgagggtgcatgttcgtgtgtgtttcagtatgtggtttttccattctgtgtactcacccatgtctgtaactatgagggtgcatgttcacgtgtgtgtgtgtgtgtttcagtgtgtggtttttcccatttttcctcccttgaggatatcgcattgtatgttttggattctttgatcttccaattaaattacatcatttagaattgctttcactaagtgtgaaacaataaaaattttttttaattgtggctctggaaataccttcctttccctttcactctgtatcaagatttgtaaattttttaaaatttttgttgttattttaagttctggggcacatgtgcaggatctgcaggtttgttacacaggtaaacatgtgccatggtggtttgctgcacctgtcaacccatcacctaggtattaagcccagcatgcattggctgttgttcctaatcctctccctgtcccaactcaccctcctccaacaggtcccagtgtgtgctgtccccctccctgtgttcatgtgatctcactgttcagctcccacttataagtgagaacatgcagtgtttggttttctgttcctgcattggtttgctgaggataatggcttccagctccatccatgtccctgccaaggacatgatattgttcctttttatggatgcatagtattccatggtgtatatgtatcacattttctttatccagtctatcattgatgggcatttgggttgattccaggtctttgctactatgaatagtgttgcaaaaaacatatgcatgcatgtatctttgtaatagaatgatttatattcctttgggtatatacccagggattgctgagtcaaatggtatttctggttctagatctttgaggaatcaccacaccatcttccacaatggttgaactaattacattcccactaacagtgtaaaagcatttctatttctctgcaacctcaccggcatctgtttctccttgactttttgataatcgcaattccaactggtgtgagatggtatcccattgaggttttgacttgcatttctctaatgaccagtgatgttgagctttgttccatgtttcctggccacatgaatgtcttcttttgacaagtgtctgctcatgccttttgcccacttattaatgttttattcctgtaaatttgtttaagttccttgtggattctggatgttagacctttgtcagatggacagattgcaaaaattgtctcccattctgtagcttgtctgttcgctctgataatggtttctcttgctgtgcagacgctctttagtttaatttgatcccatttgtcaattttagcttttgttgcaattgcttttggtgatttcgtcatgaagtctttgcccatctttgtcctgaattatattaaataaagtctttgtcctgaattatattaaataaagcataagggaaaagatgtagaagggaaagtacatgtaatggttaaggcgtctactgccaatccctccccgttcctcaagatgaagcctgacatgctgggtttaatgtgtgagacaagctgccgacaggtcgtttgcctttgtctttaataatttagattaacacagaaatcttcaccatgaatttctgaaggcctttctttagtatctcctggtgttgaatttgctgttggaaggtccaatcccagtgagcatgcaaatccattggaaataatttgcatttttacaaataaataattttaggattttttttttgtttccaggacagacttccttgtatttttttaatgagttaaaaattatataatataaaaataacatttaaaaacccacaattcaggccgggcacggtggctcatgcctgtaatcccagcactttgggaagccgagacgggcggatcacttgaggtcaggagtttgagaccagcctggtcaacatggcaaaaccccgtctttactaaaaatacaaaaattagccaggcatggtgtcaagcacctgtaatcccagctactcgggaggctgagacaggagaattgcttgaacctgggaggcagaggttgcagtgagcagagattgtgccactacactccagcctgagtgacagagcaagactctgtctcacacaaaaacaaaaacaaaagcaaaaacaacccctcacaattcagcctaggatatgtttattaaatttacatttgtctttttgcttaagattgctttggtattcgtcctctttttggttccatatgaattttaggattgttttttctaattctgtgaaaaaaatgatgttgatattttgatgggaattgcattgaatctaaatattgctttgggaagtgtgatcattttcacaatattgattcttccaatccatgagcatgggatatatttctattttgctgtgtcatctacaatttctttcagcagcattttgttgttcttcttgtagagatctttcacctcctcggctaggtatatacttagatatttttaatttttgcaactgatgtacaagggattgagttttgcagcaacctggatgagctggaggccattattcatgacaccacatccagctaatttttgtattttttgtagagatgcggttttgccatgttgcccaggctggtcttgaactcctgggcccaagtgacccgcccgccttgacctcccaaagtgctgggactgcaggcatgagccacggtgcccggcctatcatagcacttttgatcattgggataattcctcctccttgtcatttttggacacatgcttcccacatgcctcatcttccagagagggtttccaccagggctgtgctgggagttaaggctggaaaaggggagatggttccagctgccagtgccacatgagtctactcagggctgtaaccagcagggaaggtccagtgtgagcctcagactcgcatgtgggacagacgcccatgtgtgacaacgctgcagtgaatctgtttcacacacatggaggaggcggctcagggctgaccatggacctgagtcaatgagcagagatatcccagtgccatccacaaacacaggggagaaggagccacaacttctcactttcatccaaaaccccgacccctccctgtctgtgagggcctggggttctcctctgtctcatacagaggcagaaacctcccccttagtgacccccagactttgcaagtcaccagcagccgctcggctctggcctcttctgcttcttaaggtttcctgcctatgacaggaagtctcatttctcattttcttcatcggaccatggctacatatttcagacacattataagtaggttttcccaatgttaggagcagatgtgggctgttgagcatttaagttgctcaccgtgactgtgcagtccaacaccaggatccactcatgtttcagcccctcaagacttaacccggtctggaaatgtaccatgactgaggccctcccatgacccaggcaccactggcccccaaaaccactcaggaggggggttcatgacaacaggctccaaatgaggaaaccgaggctcagagatgggacttactgcccaaggtcatgcacgcagggatgaaggtgagcaattcagaaaaaattaactccctatcccaccgccaaatcagagctcaagacaagtacttgttcccaaaaccttgaaggcagactgagatgcaggggaatgcccaaggaagcggggctgggggtgggagggaccccgaggaggcaggaatgactcagaggttacttttaagggaaggggagctgaacgctattaaaaaataggaagaaaaaaagaagggaagtctaagaaggaaactggaagaaataaaacccatactccaaagacaaaagaagagtcagcatttctttatttctcctttttttctcattgccaattgcagctcaacttgaatttcacagcccgatgtgagatgcgtctctgctgatctgagcctgtcctgcagcatggacctgcaactttcctgaagcatctccagggctggatgccatggtaaggatcccgcaatgctgtgttgatggacgggctgaaggagggaaggagaccccacggggaggctctgagaagaagaaaaagcccccagtcactctcacttggacaggacagactcagaaaggtgctgtgtcctgtgtcctgacccttgatgagatgaggacagatgaggcaaatcgcagaaaagggtcagggagataccatttctgtatgaaatatctgaagacagcctggtgcctgccccagtcccagccttggggaaatgaaagccaggctcctggagagggcagttccccttcttgtggggctgatgacgggacaacctcgtgatggagaacccaggctcccagtagatttactccatccaggaactgtggtctcgtccatctgcacagccaggggctgtggaggagatgccatgacttccacccgcaaacctctgatctgtcttgatgaaattgaaagagggagaggggagactgtagcctggaaggaatcccacctcacaacttggtcctgattgaatagaagaccccagaggttcacagagatcccaaggtggggaggatctgcccagggttcaggaggcgaatctccctcaggaagctccgtgaccccctccttagtgtcgctcctgtgcctcagtgggatttggagaggatgccttagattagagggtattgttcagtgggatttggagaggatgccttagattagagagtattgttcagtgggatttggaaaagatgccttagattagagggtattgttcagtgggatttggagaggatgccttagattagagggtattgttcagtgggatttggagaggatgccttagattagaggatattgttcagtgggatttggagaggatgccttagattagaaggtattgttcagtgggatttggagaggatgccttagattagagggtattgttcagtgggatttggagaggatgccttagattagaggatattgttcagtgggatttggagaggatgccttagattagagggtattgttcagtgggatttggagaggatgccttagattagaggatattgttcagtgggatttggagaggatgccttagattagagggtattgttcagtgggatttggagaggatgccttagattagagggtattgttcagtgggatttggagaggatgccttagattagaggatattgttcagtgggatttggagaggatgccttagattagaggatattgttcagtgggatttggagaggatgccttagattagagggtattgttcagtgggatttggagaggatgccttagattagaggatattgttcagtgggatttggagaggatgccttagattagaggatattgttcagtgggatttggagaggacgccttagattagaggtattgttcagtgggattaggagaggacaccttagattagagggtattgttcagtgggatttggagaggatgccttagattagagggtattgtgtctttcagcaacaaaaccgtacaaaaaacacctgggcatttcacatcagtggataaagcatatcttgtgccaaatcaggaccaaactgcggtgaaatttagggttcacactacagttaatcacttttgaggaaagcattccaggttggtgcctatctctgtgataaacatctcccttcctggctacaggtaatggattaaagtaacactggccgaacagacactatcttcacttgatgattatactgaaaaatagccataaaattgttccctccaaatccaattccccttttgactttagacaattctctaaagaagatatacaaatggccaacaaacatataaaaaacatgtatatatgcgtatatatacatatatatacacacacacacacacacacacacacacacacacaccatggaatacttcagtcataaaaaggaacaaaataatggcattcgcagcaacctggaggcagttggagaccactattctaagtgaaataactcaggaatggaaaaccatcatcatatgttctcataagtgggagctaagctatgaggatgtaaaggcataagaaggatataatggactctggggacccagggggagcaatgggagggggtgagggataaaagactacgcattgggtacagtgtacactgctcgggtgatgggtgttccaaaatctcaaaaatcaccactaaagaacttatgcatgcaaccaaacaccacctgttcccccaaaactactgaaacttaaaaataaataaatagataaaaataaattcaccacattcaaaatgacaaccgctgaagccccagtgggcgcatgttacagggtgctcttttagtttcggccttccataggcaacttgtgtgtatcagctccattagacccctgccttcctgcaaggacagacggctctctgtatcccagggttctcgccttggtgtaccggaagaaccggatcacatgagggcttggagaatgagtgcaaggtttgattgagtggaaacagctctcagcagaagggcgatggttttctcctggagtcgggcccctggcggcccgggatcctctctgactgtcccagccaagctccatgtcgttctgccagtcggtggcctgtggtgtgctggtgcccgtccttgcgttcctctcgacatccagccatctgtgtgttcctgcactgacgtgctcctctcagccgccagtgtcttcttcttccgctgatctgcggacgtccagctgcttgtgtgtctgcctgctcaggtctcggagttgttttttttgtttgtttgtttgttttttaattatactttaagttttagggtacatgtgcacaatgtgcaggttagttacatatgtatacatgtgccatgttggtgtgctgcacccattatctcgtcatttaacgttaggtatatctcctaaagctatccctccccacccgccaccccacaacaggccccggtgtgtgatgttccccttcctgtgtccatgtgttctcattgttcaattcccacctatgagtgagaacatgcggtgtttggtttttcgtccttgcaatagtttgctgagaatgatggtttccaatttcatccatgtccctacaaaggacatgaactcatcattttttatggctgcatagtattccatggtgtatatgtgccacattttcttaatccagtctatcatcgttggacatttggcttggttccaagtgtttgctattgtgaatagtgccacaatatagttcaaccattgtggaagtcaatgtggtgattcctcagggatctagaactagaaataccatatattaatcacctcagttagttattatttctgtgtgcatgtgtgtgtgcagtgaaaatacttaggatctactctcagctaattttaagtgtacaatacagtattgttacctatagctttcattccatacattagctttccagaattattcatttcggagaattgaaactttgtatcctttgaccaacatcttatttttcccatttccagcccctgctaaccaccattctactctcagcttctatgaatttcactatttagattccacaattatgtgagattataagatatttatctattaagagttggattcatttcacttagcataatgtcatttgggtccaatcctgctatcacaaatgatctgattttcttctttttcaagactgaataaaactttatatttattatactatgttatcttaatccattcctccatcaatgggcatttatgtcatttatttacctcggctattgtgaatactggtgcagtgaattcatcagtgtggatatatctcttcaagatcttgatttgagttcttttggataattatccggaagttgaaatctggtgtcttatagttcaatttttaacattttgaggaaatgtgataccgtttctataatggatggatcggtttctgttaacttaaatcagggtattgtctttctcactcagaccgctgctggaatccttggaaattcttcactcctttacttttttagctttacttttatcacttcacagatattgagacccagagacctgattctcagccagctggtcttagccaacaacctggttcttttctctaaacgaatcccccagacaatggcagcttttggaatgaaatccttcctggacgaggctggatgaaacttgtcttctatctatacacagagtggccagaggggtttccctcagcaccgcctgtctccccagtggcttccaggccatgaagcttcaacctcagtatctctaggaggatggaactccgaattaggtccacaaagtgcattgttttctgctgccccctctgctggatcttgcaaattgtggcatatacccatattgcaatgcatgtaactggcccaatgaagagcaaaaacgtgagtatggaataaatgtataggtactctcctcacccattctaggatgattgctattcttagcaaatgcagtcattttctcccttgtggatggtatgtctttggccctcatggactacaccagcagctccatgatcctcttcttatatagacacaagcagacagtccaatgcattcgcagccacggcctctccccctgaaaatctcatgaaactagagccacacacaccatcctcgtcctggtgagcatgtttgtctcctctcatggtctagctggtattttatcactgtgggtaacctggattcagaacccaagccattggctgagaagcatctctttcctggtgtctgcaggattcccgacattcagcccctttgggttcattgtcagtgatgcccgcgtctcacagttctgcactgtctgctggacaaggaagacaaatgctccaagtgtggtctctgggctctaagttccctctagacaattgcgtcctttatttaatcacttctccccacaatatctgttggatcatacattatgccagttaatacgcaaggactttgggactcagtattgaataaaaatgataataaccatagcctcatattgcttcttaggctctcaaaaaatgaacgcagtgtaaaaattacccagatgtatgtcagttcctcagaagattaaacacagaattaccatatgacccggcaatttctgggaaaattaaagcaaggatttaaaaggatgctcatatactcatgttcataacagcgttattcacattaacaaaaaagtagaaaaaacccaaagatggataaatggataaacaaatgttatagaaactaggaaatactgttcagtctctcaaagaaatgaaattgtgactgacatacactataatatggagagccttgaagatattatgctaagtgaaataagccagtctcataaaggacaaatattgcaaatattgctaagattctatctatatgagctacctgtcaaactcacagactcaggaagtagaatcacggttaacagaggcttgggggcctggaaactgagagttggtgtttactgaatataaagcttcaattggaaagataaaatactttggggatggtgatggcgatggttgcatagcaatgtcaaaccacttcacaatactgcactgtagagttagaaagagtaaatatggtaaattttatttcatttgtttttttttttactataatttaaaatgagaaagagtagtaaaaacacacaaaagagaggagctaacagataaaaagtgcactaagttagccaagccagagctttaagaaccattatcacttctctctctctttcaccccacaatcaacattaatcaggtccaaccatgtgttctgccttcttagcactgctcacgtgtgtcccctcctctcttatttccatgcactctggcccagctgggcttcttctctctttgcctgtgatttgctctgttgtcctccctggctcagacgtgcagtcccagtctctcctgatgctttgtccccacattgagggcactgctgtttccccacaggccactcctttttttttttttttcttgagacagagtcttactctgtcacctaggctggagtgcaatggcacgatctcggctcactgcaacctccacctcccaggttcaagtgattctcctgcctcagcctcctgagtagctgggattacaggtatacaccaccacacccagataattttttgtattttttttagagacagggtttcactgtgttggccaggctggtctcgaactcctaacctcgtaatcctcccacctcagcctcccaaagtgctgaactcctaatacaccctctgtcctttcccaccttgtctgtgccctggaggctgactctatggattgcatcatcagtgtctccttgcctttagcgtctgattgagttcaaccatggaggcactgtcaggagagcagagggtgagaggagagagaggccggggaatcaattcccacacatatgccctgccaggctgtggtttgtcagcaactgtgctcctctacccatgacatcagctcccgcaaggcacctcccatctcccacacagggctctctccaccccttgacctcccatcctgggagtggcagtggcttcctggggtgcttcatccctctcatttgcccacacctttatacacttctttttcttttttcttttctttttttttttttttttttgacggagtctcactctgtcaccaggctggagggcagtggcaccatctcagctcactgcaagctctgcctcccaggttcacgccattctcctgcctcagcctccaaagtagctgggattacaggcgcccggctaattttttgtatttttagtagagacagggtttcacc[140 bp omitted]gggtacatgtgtaggtttgttaccaaggaatattgtgtggcattgaggtttggagtaagactgagcccctcacccaggtagggagcatggtacccaacaggtagtttttcagccccatccccctcctctccaccctcagtggtccccagcgtctactgttgccatctttatgggaagatgtgtacctaatatttagctcccacttataagtgagaatatgtggtatttggtgttcagtttctacattagtttacgtaagataatggcctccagctgcatccatgttgctgcaaaggacatgagttcattcttttttatggctgtgtagtcttccatggtgtatatggaccacattttctttatttggttcactgttgatgggcaacgaggttgattccatgtcttttctattgtcaatagtgctgcaatgatcatccaagtgtgtgtgttcttgactagaatgatttattttccctggatatatacccagtaataggactcctgggtcaaatggtagttccattcctagttatttgagatatcctcaaactgctctccacggcgactgttagtcctagctctttgagaagccaaggtgggaggattgcttgaggccaggagtttggggccattcgattctctaactactacccctgctgtatagaaatgtcattgatatggatttgtttttattttcttataaatcctaatggactttgaattttctatttagagaatcttactacctacaagtaatgaaaaaatctctctagccctcatatatcttatttttagttttttacttttactgatattattacatcagttaggacacctcagtagaaaatggaataaaagtggaaagaccattaagcctcgttttgttcatattttagtggaaattgatctaagcttcatcattaaatataatatttgctattgatttgttgctgggcatcctttaacatgtttatgatgtttcattctattcctaattcattaagattttttaaaccataaataagtgcagattatagtaatattgagcaaatattttcttctcacctccaatgggccaccctctagaccccctaccctcaccctcatctcccctacctcaccgcgggtctctgtcctcagacccctgctgcaggggacccctggaggtgacatatgctcagctggaccaccaggccttcacttggaggacagcccaggctgtgtccccagagtccatggtgcccatggctgagtctagcatgtacacagccctcgccaggcactgactccgggaccactgccccctgcgcctgaggaagtcatgcttggaaaagcctcaagaagccatctggagggcttccccttggaatcatcctggtctgcaaaaccagtcaactgttctggagataagaggtagagcccaaagttctctagtcagcatctagaaagttcattaaccaggtgattccttccacaactgaccagcacctcaaagaggtggcattgcagctacttctagaaacccagctgcaatcacctggctgtttccagacacctagttccagtcacctggttgtttccagtgatccagctgctgtcacttctctgtttcaagacacccagctccagtctcctggctgtttgctgagtctcagctatagccatcccagctgattccattaacaatgttgcatccccctgcagtttccaaatgtcttctgtaaatccccccagctgccccagcaatcgtctactcagctgatcctgaacattctcctagagtttagttgttgaccttgagaatgagctatacatatggatctgagagctgagaccagtcctctgggtcatgctttacttcatgcaccaatgaatagtttaaagacctcacatctggcagtcctgtgtcatgttctggggtgtatagatcacttggacccaatctctgccttcatgttgttcaaggttacatggggttaacaagagctacaaaggaggtgtcagtatttttttaaggatttcattggcagtgattgcatatattcaagatgcacaaggtgataatttgatatacatatacattgtgaaataatagccacggtcaaatgaatcagcgcatccatcaccagctacgctgtacataagatcccctgaacttgctcatcttaggcctccaagatggagcatatgatcagggatcaattaaggtgtctgagcggatgcatggatgggtgaagacagagagctaatcccacttatgcacttacacacatatgcacatgtactcacacattcacacatgcacacacatgcacaaacctgaacgcactcacacatgtcaggagacctctgaatcctctgtgcgctgggacttggttgtctccacccctcttagaaagttagatgctctccctattcagattaaaacggaaaattacttgagaaccactagggggagacagtacctcatttgaattaatttttgtgcacatttaaaataaacaataacacacttaccatgggcatgcctttggccggattgcaaaggtaaacatatatcaaagcatctcatggtacccaataaatatatacaattattatttttcaattaaaatatcgtaataaaataacagaaaagaaacctgcatacttgtaacagagtggatttttaaatgtcgttttatacaagaaaaagaatattttttaaaaaactcaacaataactcaatcagcttatcctatggagcaattactagttgaatactatgcaaacatcaacacattcactagtcttacatatgccccacagcttgtcctattttttccccacttgtggggattttgatagttgttgagtatgtctaatccaattatacattccagagcaaggaataaagccacaggatgcatttggtggccaagaaaattcaacaggagacaaatctgagctaaaggttcattgactacctgacctccataagcttctaatctgactggagggtcaccatgatgttttgggtcttctgaagttagtgttagctcagagccagtgtctagttgcacccaaaatatctgatcatttcctttacccagtacacagctaccatgataaaggccataggtccatttaagggaagctgagataaatataattgtttaactttttatagtatataccggggcagcgccttcaaggatacctggtcttccctttaattcaaggggttctgggtctataaactggtgaaattctagtaattgattaagagactgtaactgtctattttatgattttaattagattcttgttctctttgccaagaaatgttctgcttatacaaatcaagtaagaatgaagtaagtttcctatctatttcacgtcttagaacgctgcggtcaactagacaacactaaagggctgcatgagacagtctattctgattactgccttgattctgctttccattatgatcaccacacccagttctatgataaccacacccaattcaacacaccagattctcacctttgtcgactgacttctgacacttgagtcctgccactctaggatccaactactccccttacatttaggtttctcggttcagtggcagcagttcccactggaagttctggcctctcctaatacaccctctgtcctttcccaccttgtctctgccctggaggctgactctatggattgcatcaccaacatcttcttgtgtctagtgtctggttgagttcagccatgggaggcactgtcaggagagcagagggtgagaggagagagaggccggggaatctattcccacacgtacgccctgccaggcaataaactgtgctcctctacccatgacataagctcccacgaggcacctcccatctcccagctcagtcctcaaggtgactttccagagacctagttacattcggctgttactaaagagtcagctacagtcatctagctgtttccagtgaccacccccaatcccccatagctgcctgcctgtttgcagagacccagctacatgcacctagctgtttctagagacccggctacatccacctggctgtttccagagacccggctacatccacctggctgtttccagagacccggctacatccacctgactgtttccagagacccggctacatccgctggctgtttctagagacccggctacatccacccagctgatttcattatcactgacgcagtccccagctgctcctatgtctcctggaaatccccaattgccccagagactttgttgtaattttctgttcagctgactctagggatcttcctggagcttaattgctggccttaagaatgggccatatttatgcaactgagagcagagcccagttctctgggccatgctttcctttgtacatcaacaaataatcctaaagacctaaagtctggcaatcccacgccaggtcctagggtgcacaggtcacctgcatccagtctttgccttcacagttattcaaagctgagcagggaaaaaggagagccacagagaagttcagtgttttcctttttatctttttaaaaaatccttttttatccttaaaatgatttaatcaaccaagattgtatatattgaggtgtacaacatgatgatttgatatacgtatacattgtgtaatgattgccacaatcaaattagcacactcaggacaaccagtgccctaaatagatcccctggatttgtacacgttatgccttaaagttggtgccagagttccatttatttatttttatccatatataatagttgtatataggtttggggtacttatgatattttgatacttgtatgcaatgggtaataataaaatcagggtaattagaatatccatcacctcaaatatttatcttttctttttgttggggagcattacaattcttttattctagttgttttgaaatacacaatatattattgttaactatacttcccctactgtactgtcaaatactcagttatttctcctatccagctgtatttctatactccgtaactaacatctccttatctcccaccctttccagctctagtaaccaccagtctacacattttttttttttgagacagagtcttgctgtgtcacccaggatggaatgcagtggcgtgatcttggctcactgcaacctttgcctcctgggttcaagagattcgcctgcctcagcctcctgagtagctgggattacagatgcatgccaccacgccaggctaaagacagggtttcaccatgttggccaggatggtctcgaactcttgacctcaagtgatccacccgcctcagcctcccaaagtgctgggattacaggcatgagccaccacgcccggccttttttttttcttttgagacaaggtattgctctgttgcccaagctggaatgcagtgacacaatcatggctcactgcagcctcaaccctccagggctcaagcgatcctcctgcctcagactcccgagtagctaggaccacagtgcacaccaccacgcccaactaatttttgtatgtttcgtagagaaggggttttgccacattggccaggctggtctggaactcctgacctcaagtgaaccacctgccttggcctcccaaatcactgggattacaggcacaagccaccacacctggccaaccagtctactctctctgtttaggaatccacttctttagctcccacgtatgagtgagaacattcgagatttgtctttctgttcctggcttatttcactgaccataatgacctccagttccaactatgttgctgtaaatgtcaggatttcattcttttttatggatgacccctcttccattgtgtatacataccacattttctttacccttttatccactgatggacacttaggttgattccgtatgctgacttgtgaagagtgctgcaataaacacacgggtgcagggactcttgtgatgtcctgagatttttttcctttgcatgaatattcagtagtgaactcactggattttacgataattgcagtttcagtatcttgaggaatctccgtgttttttttttttttctttttttgagacagagtctcactgtcgcccaggctggagtgcagtggcgtgatctcggctcactgtaggctctgcccctcggggttcacaccattctcctgcctcagcctcccgagtagctgggactacaggtgcctgccacctcgcctggctaattttttgtatttttagtagagacagg[135 bp omitted]actaatttatattcccaccaacagtgtctaagagttattttgtcagcacatcctcaccagcatgtttttattttattttattgatctatttatttatttgtttgtttgtttagatggagtctcactctgtcgcccaggctggagtgcagtggtgccatctcagctcactgcaacctccagctcctgggtgcaagcgattctcttccctcagcctcccgagtagcaggagcctcctgattacaggcgggcgccaccacgcccggctaatttttgtctttttagtagagacggggtttcaacatgttggccaggctggtctcaaactcctgacctcgtgatccgcctgcctcggcctcccaaagtgctgagattacaggcgtgaaccactgtgcccagcccagcatgtttttatatgtttctttgataatagacattttaactgaaataagatgatactcattgtagtttcgatttgatgccagtgatgattgtgggtttttgtttgtttgtttgtgttttgagatgaagtctcgctctgtcacccagattggagtgcagtagtgtgatcttggctcactgcaacctctgcctactgggttcaagtgagcctcctgcctcagcctcctcagtagatgggactacaggtgtatgccaccacgcccagctgtttttttttctttttttgtatttttggtagagatgaggtttcaccatgttgcccaggctggtctcaaactcctgggttcaagtgatccacctgctttggcctcccaaagtgctgggattacaggtgtgagccaccgcgcttggccgatgattagtgttttatatagctgttggccatctgtacattttcttttgagaagcaactattcagatgctttgcatacttgttaatggaattatctggggattttttgttgaggtgtgtttcttctaggcctaatttgttgatagttttaatgatgaagggatgttgaattttgtcaaatgtttttttaacatctattgtgatgatcatataatttttttttttttttttagacagagggtctctccttcacccaggcaggagtgcagtggcgcgatcttggctcactgcaacttccacctcctgggttcaagagattctcctgtctcagcctcccgagtagctggactaccggtgcacaccaccacacccagttaatattttgcatttttgagagagatggggtttcatcatgttggccaggctgatctcgatctcctgacctcaagtgatccacccatctcaatctcccaaagtgctgggattgcaggcatgaaccaccgcgcctgcccatgattatatgttttttgttcttccttctgttgacatgagatatcatatctattgatttgagaatgttgaaatatcctcccttctggctgctgtgtggactgcgagctctcctaccctccatggtcttccaatcccactgtccccaggccaactgctcccagactatgcagtagtctcatgtgcatggagcagttgcaattgatcctggtggtgacagaggggttggtgtttcaggcatggcacagtcagaggaggtcccaaggagagaccaagaggtaaacttaagtagagctgcaccccttccttggcatctgtagaaccctggataaaatcaaatacgccaacccaaatgcccatcaatgatagactggataaagaaaatgtggcacatatacaccatggaatactatgcagccacaaaaaaggatgagttcatgtcctttgcagggacacagatgaagctgaaaaccatcattctctgcaaactaacacgagaacagaaaaccaaacatcacgtgtcctcactcataggtgggagttgagcaatgagaacacatggacacgaagaggggaaaatcacacaccggcacctgtcacgggctggggggctgggggagggatagcattagaagaaatacctaatatagacaacaggttgatgggtgcagcaaaataccatggcacgtgtatacctatgtaacaaacctgcacgttctgcacatgtatcccagaacttgaagtataataataaaaaaaaagaaaacgaaacaatgaaacatgggttcttatgaatcacagaacacccgtgaccccaagttaagatggaaatttatgattcattccaactaggtcctgttttcagtatctcacaaaagcttgactctagagtgaaatatacttggaaatgaatgaacgactcttgtggtctttttacttcttgtaaggctttaggatccacccgtttgaatacctatgaccaggacctcctgcaatgcttctctctccacctccaggcatcccttcattcagataataccaattcatcatcaccatctgacctctccttcagcttcttcaccaccctccatctcaattgctttctgtttttcttctttattttttgaacttcaacttttattttagatacgaggatacatgctcaggtttgctacatggaactattgcacccaggtggtgagtgcaggacccagtgggtatttcttttatcctgtcctattgcgttaaatctttccttcccgggactggtcctatctctaaactttttgcgtagtgattttatcaacttaatttttgctaggatgctagattttctaggaggggaggtaatttgaaatgaagtctgggttactgtgaatccagtatatctgctttgctcgcctttatctcttgtgtcctgggatggccacaggttgacatgtttaaatgtttcttaagtgaggatggataa[140 bp omitted]atggtgaaaccccatctctactaaaaatacaaaagttagccgggtgtggtggcagctgcctgtaatctcagctctcagctactcgggaggctgagttaggagaattgtttgaacccaggaggccgaggttgcagtaagccaagattgcaccactgcactccagcctggatgacagagtgtcaccctgtcacaaaaaaaaaaaaaaaaaagaagcaaaatacaagaagtccaggactggtaaaggcaaggcatgttgagcggttagaaaaggggtgatgacatcgaaaaacctcctggcatttcccagtccttgcctagcacaggttactctgaaagcaggacttaagacaaggatatgagcgcaggtaactgatttgggaaccaagtttaagggaatagggttcccttatgaaagagagaaggagaggaattcctgaaatcagcatgcattgcggacaccactacagcaggtaatatggacaggtccacaccaggatctctgataatgtgcagaccatcatccagaacttcccgccaaaacaggagatactcgccaatatgtgtatggctttctagcccccatttctgggagtttctttttccccagccactgtcagacgcatcaagctttggctgaaatagcttccaataaggtccttacacacaaatgtggagagacacatggaaatcctcgaaatgagatactgtcccgtgattctgagagtgacccaaaaggatacggaatgaggtactaaaagcaggtgcttggaaacctgagggcagtggtgttcatgcgtttcccggcactttgactttcagcctcctgcaagcctctccttctttgccttcctgaccgttagatacaattaatttggggtttgttttttctgcttcctctttcccctcccaccctatgtttcagttctaaagttagaaggtcctctcatccttttaagaagaacagagacagaaaatggttagtcaccatctaggacagactacaattccagatcattgcaggacgtgcccactcaaatggatgattattgagagctggccacctgaagtgttttacacaggcagtgatctaagggttgaagctatctggcctttttgcttgcttgttatgtatttatggcttttttccttttcaaaataattttactaaatatttaattcaccaactatatatatttatggggtacaatgtgttataaatgtatacactgtggaatgatggaatcaagacagttaacatgtccatcactccgcatactaacatctgtgaaaacatttaaaatctatgcttggctgggcgtggtggctcatgcctgtaaccccagcaactttgagaggctgagatgggcggatcaccagaggtcaggagttcgagaccggcctggccaacatggtgaaaccccatctctattaaaaatacaaaaattagctgtgagtggtggcgggtgcctgtaatcccagctacacaggaggctaaagcaggagagtctcctgaacccaggaggcggaggttgcagtgagctgagatcacaccacagcactctagcctgggcgacagagtgagactgcatctcagaaaagaaaaaatatatatatatattttggagctacatcgtgctagcgctgcagagaatgagttttgttttgcgacacagtttttagatgtctaccgggctctggtggagatggaatgtttggcctcaagtgggcaggtcccatgggacatgagtagccgaccatgacctggctgcgtactggcccaccaagcattcgactggcgtgcccagccactctccgtcatcgcagagaagtgctctatgtgagatttggttaaaggagtccctgaaggcctgtgggaggcagaatagtgacctcccagagatgtccacctcctgaggcccagaccctgtgagttggggaagcttatgtggcaaaagggactttgcagatgtgattaagtcaaggatcttgggttggggagattacccaggtgggcctgatgtaatcacaaggggctgagtaagtgaaagaggaagacaggagggtcagagtgagagaaggaggtgagtgcatggaagcagggggcagataacgggactggtggctttgaggttggagggaatggagaggcaggaatgcgggagcctgcagaggcttgaacaggcgagggaacagattctccttggagcctccaggaggacacggctctgatagcagcttcattttagcccagggagacccattttggacttgtgacctccgggacggtaagtcaataaacctacattatgtgaagccactaagcttgtggtgatttgttatggcagcaaaaggaagctttatggttcatctgtaccctgaaaatgcaggtttttggttttttttttttttcacttgttcaatgatgtacccccagtgtcaggcgctttgcaaacacacgatacatacgggttgatgtttggtcaagagaggaattaagaccaggcagacagcaggctgggatcagagagaccccatttctgtctgaaatgtctgcagagaacctggtgcctgcctcagccctagctctggggaaatgaaagccaggctggggttcaaatgagggcagtttcccttcctgtgggctgctgatggaacaaccccatgacgagaaggacccagcctccaagcggccacaccctgtgtgtctctttgtcctgccggcactgaggactcatccatctgcacagctggggcccctgggaggagacgccatgatccccaccttcacggctctgctctgcctcggtgagatttaaagagggggaggggagacccgagtcttggaggaaatttgcctcac[187 bp omitted]gttgcaggcgcctgtggtcccagccactcgggaggctgaggcaggagaatggcgtgaacccgggaggcggagcttgcagtgagccaagatcgcaccaccgcactccagcctgggtgacagcgagactccgtctcaaaaaaaaaaaaaaaaaaaaatctcagggtaaagagaggacctgctcaggcttccggggcaaatccctcacagggaactctcttccagggctgagtctgggccccaggacccacatgcaggcaggtgagtctgtccccagctgtcccaggtccctcctcctcactgggacaaggggccacccatgggcagctgggggaggagacagcagttctgggtgactgatgaggatgacgggggggtcctggggctgagagctgggatctgagggctgaggaaggtcttgggatccagcctctgattttcttccagggcccctccccaaacccaccctctgggctgagccaggctctgtgatcagctgggggaactctgtgaccatctggtgtcaggggaccctggaggctcgggagtaccgtctggataaagaggaaagcccagcaccctgggacagacagaacccactggagcccaagaacaaggccagattctccatcccatccatgacagaggactatgcagggagataccgctgttactatcgcagccctgtaggctggtcacagcccagtgaccccctggagctggtgatgacaggtgagaggacactcaggggtcccagccccaggctctgccctcaggaagggggtcagctctcaggggcatctccctctcacagcccagccctggggatgatgtgggaggtgggagccccatttaacacggtgcctccttctctcctaggagcctacagtaaacccaccctttcagccctgccgagtcctcttgtgacctcaggaaagagcgtgaccctgctgtgtcagtcacggagcccaatggacacttttcttctgatcaaggagcgggcagcccatcccctactgcatctgagatcagagcacggagctcagcagcaccaggctgaattccccatgagtcctgtgacctcagtgcacggggggacctacaggtgcttcagctcacacggcttctcccactacctgctgtcacaccccagtgaccccctggagctcatagtctcaggtgaggctcctgaccctgtcctctctgagctcagtggctccgttcatgccctgctgccaggagagctctgggcagggatggagggagaggggctcagccagtgggggactcagccctcagaggggaggaggacaacaggggccctcccaggcatgcccatgctcttctccctcacctagggtccagaaggtgccaggtggacagagaaatggtccttgggaagctgcagggcagatatagggagaggttcaatttgatgtggagacccaagggcaaccccagactctcaccctcctcttgtccttctacccaggatccttggagggtcccaggccctcacccacaaggtccgtctcaacagctggtgagtctcagaggcctctgtccagagagtttccaaagcccgaggcctgtctcaagacatgctcagtggatctaagtcctcgttccaattctcagctgggcttgcttccacgggtgtgggagtcgggcagcgacttgggaggcaccacaggctcccaaggccctgaggctgggctggtgaggggtgagggggtcaaggctgaaggagatgttgcggggagaagccgagctgatgtggggagcagggcagccccagccctcacatccctgttctaacccagcaggccctgaggaccagcccctcatgcctacagggtcagtcccccacagtggtgagtgaggggctctgagtgggaggtgggcagggtctaggggagccaagggtgggttctgtcctaggttaaggctcctctggaggtggtgatgtggacaggcccctcccctgcatgggcctcagtttctccaagtgtaaaggagagaggcctgcgggtgggaaagttcctttcagctctgactcccagctgtgccctcctgggagaggaggcctcccagggaacctcccagacccgattccgcaggggcctgtccggtcccacctgcagcagagacggtgacctggggcaggggaggggagcagggcggtggttcaagacagtcaggctctttccctgcaactctggggcttggctctggtgcaggaacaagggctgcagctcagactcccgggtttccttcccagctctgccgcttcctggctggaggggtctggggcaggcgattcccctctctgagcctcagtttgtgcatctgtgaaatgggtggagagagggtggcaatctcaggttgcacaactgctgtgagggttggaggtaatgaaagaaagacccagcacacacagtaggtgcacacacagtaggtgtgcacatcaatgacatcatccccattcctgatgtcatcacgcccaaggtctgagaaggcactgggaggtactgatcggggtcttggtggtctccatcctgcttctctccctcctcctcttcctcctcctccaacactggcgtcagggaaaacacaggacattgggtaagtaggaaattgggggacccgtgggctgatggagggtgggctcagggcaccagccaaagggactccagataggagaggtcatcttagaaactctgctccagaaattcccagtgagaaaatctagaaagaagaaaatgaatgagggagtaatggaagtgctttattctttcggtttttctaaacttagaaagtatttaaaacatccttgcaagtgtattttcaggtttcctttcctcttgacttgcatgtgcaaggcaggtggttctaacgttcccagagctgagactctgtccatcttcccccagcccagagacaggctgatttccaacgtcctccaggggctgccgagccagagcccaaggacgggggcctacagaggaggtaattctgcccaaagacctcagactcccacccatcccaacagccacctcactgtccccttacactcccgtatcctcccccaggtccagcccagctgctgacgtccagggagaaaacttctgtgagtgagaggcagagaaggtgcacctggggtggagctgggggtcccaaaatttcaatagcaatgggggcaggagcacaggctaggattggtcagggactcagggagaagtggtctgaacccacattgtgggacctcggggacatcacagcccctccctgcgttgcagtggcactaatgggaacagggcagggaccagcaggaatgagaggtcccagggaaccttcccaggagatgaaccccttgctctaccccagcaggtgctgccgtgaagaacacacagcctgaggacggggtggaaatggacactcgggtgagaacccgcccctgtccccggcaccaaaggcctcctggtgccagatctaatcctgcaggacttctctgtcctccttcccccggctctcagcatcgtcacggtggacccctccttgtccagcacgctgcctcctgcctgctgggacctcactctctcctgctgtcctgggacctcatgggcctcctcccgggtccccttcctgctcctcatcctctgtttggccatctggttgttagagagctccccaggcctcaggaggatgacgaataaatgaaccactccagtcccctgggctccccttcattcattcatctagtgagtgttcccagggagctcactgtggatggggctccccatgggagctgcagacacagcagggagcaaagccgcccccgcctcctgagctcacctcgtggtgggagacaaaatgcaaataaatgcatcgtgtccaggagtgcaacgtgctgtaaggaacataaaccaggtaaagggcagagagtgtggggcagtggggccagtctgaatggaaagggagggctgtctgctcagctgtcatctgagaagcctggacggagagggccacgtgatcctctaatggacgagcccctgcaggcagaggaaacagccgtgcaaaggccccgaggcagcagcgagctcttgcaggaaggccgcgtgaggctgcagccaaatgggcaaggtcagagtgaggagcagagaccagaaccacagggagggagcggccagaccctccacggccttagggcatccctgagattccgtcaggaaagggatgtaatcggatcaccctgggaacagtggggaaaattgactccagggagtcaggaggattcaaggacaccccccaccactgtctctctccagcagagcccacacgatgaagacccccaggcagtgacgtatgccaaggtgaaacactccagacctaggagagaaatggcctctcctccctccccactgtctggggaattcctggacacaaaggacagacaggcagaagaggacagacagatggacactgaggtgagtcctttcctctccaggcccccaggcctcccccacccccaccacgttccttccctctcactctcccccgctgcaggctgctgcatctgaagccccccaggatgtgacctacgcccggctgcacagctttaccctcagacagaaggcaactgagcctcctccatcccaggaaggggcctctccagctgagcccagtgtctatgccactctggccatccactaatccaggggggacccagaccccacaagccatggagactcaggaccccagaaggcatggaagctgcctccagtagacatcactgaaccccagccagcccagacccctgacacagaccactagaagattccgggaacgttgggagtcacctgattctgcaaagataaataatatccctgcattatcaaaataaagtagcagacctctcaattcacaatgagttaactgataaaacaaaacagaagtcagacaatgttttaaattgaatgatcatgtaaatattacacatcaaaccaatgacatgggaaaatgggagcttctaatgaggacaaacaaaaaatagagaaaaattaataaagtcaaaatgtttattcttgaaaacattaatgatacatgaatcttggccacaatgagaaaaataaaaatgaaaaaagagcaggcatccatttccatacaggaacaaaataggaggcagcactacagaccctacacacagctttacagaggtgaaagaaaactgtcagcaattctatgctgacataacagaaaatgtagatgagatagatgaaatacgaaaaattacagtttacttaatgaacataaggataaatagaaaaactgaatcatcatacataaacatatataaaatgcattgatcctgtaatcaaaaatgttcccacaaagtaaatgccacttcagcaaggtttgttggtggttttttcaaactcttatgcactcatgaaacacacagacacacacacacacaaacttgcataaattttccctgagaatattttgtatatatttacacaaatacatttgatcagactaggaacaagttgataccaaaacctgaaaaggaaactacagaatgggaaagtcatagaagatctctcacagaaatataaatcccttaacaaatattaacaagtaagattcatgtctctataaaatagacagtatatcatgaccacactggttttttgttatcctttgattttgtttatgaaaagcaaggatagcttaattttcaaaaactcaatcaatgtaattcagtattttaacaaaaggaatgaaaaattatcatctcaatagacaaagcttttgtctgagcaccttttcatatagctgctgaccatttgtatgtcttcttttgagaaatgcctgttcagctactttgcccatgtttcaagtagtttttggtttcttgctgttgctttgttttagttccttacatatttttgcatattaaccctttatcaggtatacagcttgcaactattttctcccatttctgagttgtctcttcattctgtttgcagaagctgtttagaagccacaccttttgtctatttttgcttttgttgcttgtgttttcagggccatatccaaaaaaaccttgcccggaccaacgtcttgaagcttttctcccacccatttttgtatatgggataagggttcaatttcattcttcttcatatgaatatccccaggatgtgtcctatgcccagctgcacagcttaccctcaaacagaaaataatgaagccttcttcctcccaggaaaggggacgttcagctgagccgagtgtgtatactgctctggccatccactagcccagggaggacccagacctccacactccatggagactcagttctcctaggaccatttattcaaaaggactgccctctcttgttcttggaaactttgttgaggatcaattcaccataaatatgtgtgtttccttctttgctttcatccctgttgcactgatcactgtacctgtttctattccagttccatgatgtcttcctggctgtagctttgtaggatatttggggattccatagtgtgatatccccttcttccctttgctcaagattgttttggctatttggggtccttttgtagtcccattcaaattttaggattgtttttctatttctgtggaaaacgaccttggaattttgttaggaattgcattgagtctgcaggtatgaacttttttttaaagttccagggcacatgtacaggacctgcagctttgttacataggtaggcttgtgccatggtggtttgctgcacctatcaacccattacctagttattaagcccagcatgcattagctctttttcctgatgctctccctcccttcatcatccgccctcccactacaagccccagtgtgtgttgttcccctccctgtgtccatgtgttctcattgttatacgaacattttaacaatgttaattcttgcagaccatgaacataagctaccttcccatttatatgcgtcttgttcaatttcattcatcaatgttataaagattttagtgcagagatattaaacctccttggttaaatttaattctaagtaattttttagctattataagtgtaatttttctttcgatttctttctggatagtttgtttttagtatatagagatgctaccaatttctgcatgttgattttgtatcctgcaactctactaaattcgtggatcagttctaaaagttgtttggttgagtctttagagatttttatatataaaatcatgtcagcaaacagagacaatatcactttttatctgatttgggtgcttttgtgtatttttattgcctaattgctgtgtctaggacttctattactatgctgaatagaagaagtgagagcatatacttttgagcaaggattcttccatcctcctcctacagaaagggcaggttctaattgcactctggctgaactattagcacttctcatgcacttgtgtgctcagccctcagtcagcctcattggaaagggtccaactgaggaaggcaccagatgtatttgctgctaagtcctggccacagacagtggatgacagatgattatttaaataaagattagctttcctttcaaagttggagtgctaacccacccaatgtccctaaggcttcagggcaggaccatggaaagaggaggaggaaggttctgagaactagacaaggggcactgaggaggcagaaatgaatcaagtgctgtatccagggagatgtggaggagactgttagaaaatagtaacaaaaaaagggaagcccaagcagagaattgtttggtagaaagaatacccacgacccagggtcagtggaggagttatgttttcttcccctatttccctgcatttctgcactatgcacagtgatatcgctgtcactttctcagccctgcaggcttgtcagaacccagtgaccgcctggaactggtggtgacagatgagaggacactcagggatcccagccccaggcactgcattcaggaaggggttcagctctcagggggtgtctcccttctcacagcccagccctggggtatgatgtggaaggtgtgagccccatttaacatggtgcttccttctgtcctaggattctacagcaaatccaccctctcagctcagcccagccctgtcctgacctcaggaggtaaggtgacaccattatgtccttcacggctgggatttgacaggttcattctgaccgtggaaggtgaacacaagctattctgtctcctggaccccgaaaaacagtccgatggacagttccaagccctgatcctggcagaccccatgacttctagccacaggtggaggtttaccagtctggtttagcagactttagcacctgagaccaagagctccagcagctcactagattctgaccatacctggaggcaacctggtgaaagaagaggcttggaaggaaccagccctctgagtcccagctcctcgcacactccaggtgtgcctagggagccctcccatttgactccacagggtcctgtcatggcccatggagagaggttgaccctcctgtgttgctctgatgttggctgcaaaatattctctctgtccaagaaaaagatacatcaccttccccagagttctggccagaagttctcccaagatgacttccccttaggccctgtgagcatctcccatgggggccagtacagatgttcagtggacacaacctctcctctaggtggtcagcccccagtgacccccctggacatcctgatcgcaggtgagaagcccagcgggttcagttagggacccaggctctgtacaggccctgccaggggagcctaggtggtgatggttgggatgaggggtgggggtctcaagggagggagaggcagagagagagagaggatggattgggcggggacggggaaactcagagaaaacagagacagagatactgagggtcccagagagaggcctggggaagtctcagctcagaacaaggtggggcggctcctcacccatccttcttctctccaggacagatccgtgagacagcctccctcttggtgcaaccaggccccactgtggtctcaggagagaacatggccctgctgtgtcagatgcaaagctgggtggacagacactttccttctatctgaggaggatgcagctgacaagaccccaccctcgtatctaatatcaaagtaccctactctgtggtagaggttgaattctccatgagtcctgcgacctcagcccatgcggggacctacaggtgctatgcctcatagagtgtttaccccaagctgttgttcccccagtgacctcctggtaatacaggagttactaagaaattgttttaggcagatagtaagggtaaaggttcttggtggaaattttccagtaataaggaacaatccctgaaccatctcttttctaacagaaatgacagcttaaatggcccggccagcaagctttaatgtgcaaatgccaaccattaaaaactgggttcactcaatatggtgattcctactgtcttctctttgttaccacctgtgccaagtgtgatggccacctccagacaacaccatgtattcaaaacatcatggtgacccaaatgaatgaaaaagccctttttaatatgcatttttaaaggcctacagaaaaccagggccaaacctctcaattactctaaactgtctataatggaacaaaagccaaataaaaatcttgtagcctttataaaaaggctaaaagaggcactaaaaaagtatatctttttattctctaatccagttaagtaacagctcatcctgagggacaaatttattacacaggcagctcccaatattaaaaaaaaaaaaaaaaaaactacaaaagaaagctacaggaccaaatagcaccttaaaaaacctcctgaaggtggccactttggtcttttataatatggaccaggaggagtcccaaaagaaagaaaaaaagctcaggagaaggacaaagtctctagcagcagctttgaaggctcgcaaagtcccagatcaccaagatgcatcctctagttgctattagtgtagcaggccagaatgtccagtcagcaaaatgaagcaacctccactctgtccagcctgtggcaaaaaccactgaaaacagaactgcccccagacatggaggtcactgagttcaaaaccagtctcacagatggtccagcaaaactgatggatcctggtgcttgaacctaggctccagtagctcaaactgccattatagcacaagagccctggataattctggaaattaaaggaaggaaagtagacctccttctaaacactaaagctagtctctctctcttttctattctctaatccaggcctcccttcttccttcatcacaaccgtaaggggcatcttaggaaaaagtctaatccaatattttctcaatcttagttaaaacatgctttcggtcaggcacggtggctcacgcctgtagtcccagcactttgggagactgacgtgggtggatcacctgaggttgggagttcaagaccagtctggccaacatggagaaacctcatctctactaaaaatacaaaaaattagccaggtgtggtggcacatgcctgtaatccaagctacttgggaggctgaggcaggagaattgcatgaacccaagaggcagaggttgcagtgagccgagatcgctctattgcactccagcctgggcaacaagagtgaaactccatctaaaacaaacaaacaaacaaacaaaaaatcaaaaaaacatgctttcaagccattgaagccattgtcatgatagctctactagtcagaaaagcctgcaagttaaccctagaaaataaaaataatttaactgtttacagcccacataatgtagcagaatcactgtcctctagggggagctcttagctggtaaacagcccgtaaagcaaaaagtaaataaggcagaataagcagtagtcactctctccaggcacaaacactcaattagctgagttaatagctctttaaaaagcacttaaattaagcaaggaaaaggcagctaacatttacactaactccaagtatgctttcttggttctccatgctcatgctgccatttaaaacaaaaaaacatgttcttactgctaataaatctcctataaaaaatcaccaaaaaattagcaagttattcttattttttcttccacaaaaagtagcagggatgcattgtaagaaacatcaaagaataaacaataaggtagccaaaggaaataagttagccaatcgggcagctaagtcaaaggcataaaagcttcaaggccttaatgcacttcaagccccttctaatctaaaaaggctccataagagaaatcacacctcagtattcccctgaaaaaatagaataagccacttctcaagggcatacttttcagccctcaggatggctacagtcaggatggcaaatttattggtcagcctccagccaacagaaagttcttgaagtcctaagcttttcactcaggaaaaaataaaacttatcaatgggctcaaacattgttttcagacgggaaacctctagaatggttaaccacgtaacctctctagctcacttccaacaaaaattgacacaatagcagaagcccagccctaggaaataaaaccacctttatttaactcaggaaatttagtattagtaagaactctcatctctgtctccttccctaagccaagctaaaaagggccctacactgttcgtctttcaacctcctcggcagtaaaagttacaggaatcaacttctacatgcatcacactcaagtcaaagccaaaaagctaaaaaaccaacccctaacagtaaaaaaaaaaaaagctaaatattaatgtaaaaaaatagaagatcttaagctaaaaatcatagaagataagtaactaagtaagggctacacatcttactcagtcccactcctacccaccaaatatgttttattatttctaaccttttctcacaaagttcacggccaaatattaaaacttctttttaacacttatttgcagcaaaatttaaatattcataaaatc[139 bp omitted]ctcccgagttcacaccattctcctgcctcagcctcccgagtagctgggactacaggcgcccgcca[146 bp omitted]gcaagtaaagttttaaacaaaaattactggccagaaaaaaaaaaaaagccattcttgtgaaaattgttgtagtcacactgctatttgcaatgaaactatactctgtggcacccacaatgtagaattctggttgtaaaattgtaattgtggtaatattttgcctgattatcatccttataacaaaattaataattgcagaaaaaatttaatcaaggttgttttgcttatagcagaagtaatagtaacgaataaaaagcaagcattaaagttttactagcattaagtgtaataaaactttttaccaaaggttggtgatataatgcactgtaagctataaaaaggttataaaaacatttacataaaaaaggattttgtatggtgaatacttgtcctaaaagaaaataactggttgtttaaaggaagaatgtttaggacaagtctaaaagtttaagtgtgttgtaagagagtctgtgaaagtcataaaaaatttaataattaaaaaaagtcaaaattaacgctaaagttattttagccacccaataatgtatttctcccaatcatactgcaagtagtaaaaatggcctaagcctaaagttattctctactggcacgttaaggaggaaacatatgcttttctctaggaaaaagttacttttacagtaacgttcctggtaatgtacaccgacatctagtggaggaaaacctgtattgcaatccattgatacaacaacaggtgtcaaactccactgtcacttagggtctgtaggactgccactaacgatggtattttttttttttttgaaacagagtcttgctctgttgcccaggctggaatgcagtggcacaacctcagctcactgcaacctccgcctcccgggttcaagtgattctcctgcctcaacctcccaagttgctgggattacaggaactcaccatcatgcccggctaatttttgtatttttagtagagatgaggtttcaccatgctggccaggctggtcttgaattcctgtcctcaggtgatctgcccgcgttggcctcccaaagtgctgggattacagacatgaaccaccacacccagccccaatggtggtaatcttaatactcatattctaaccctatattttaaaccttcttgtaaaatttctctctttttgcctaaaagtaattaaactccaaatggtgctgcaagcaaagccacacatggacacgccattcttttgagaaaccttaaatcaacctcagaaaaaggcccaactgctgttcccccacacaacaccccttttcagcaggaagtagccagaaagaaacatgatccaacacgcactaacagcagttagctttgcctctctttaaggggaggaataatacaggagttattaaggaattattttaggcacatagtaagggtaaaggttcttggtggaaattttcctgtaataagaaacaacccctgaaccatctcttttctaacagagaagctgtcttaaagagcctggccggcaagctttaaaattcaaatgctggccattaaaacatgggttcatgcaatatggtgatttctgccatcttcttatcaccacctgtgccaagcgtgatggccacctccaaataacacaaagcatcatggtggcccacatttgcatattaaaaggctaaggtgggaggaacaagtttttcgagggctatgtaaatgacacacctggcctaaccaatcccctgggccctatgcaaaccagacacttgcctcctccagcctcccaatataagcaaccacttttccaccacacacggggttcttctttgttccaagctcccctcccttggctctgtacagaggagctcttttcttctttctttcttctttcttgcctattaaactttttgctccttaaaaccactccacgtgtgtccttattgttttatctaaactggcatgagaccaaaaaccctagtcaccaaagccatatcactggagctcatggtctcaggtaagaaacctccaacccgtgtccattgaagctggcattagtcgtgtgaatgtagaacttcatgttagtaacacagcttttaaaatgtttccctaaattgaggcggagcttgcagtgagccaagattgtgccattgcactccagcctgggcgacaaagagagactccgtctcaaaaaaaaaaaaaaaaagtttccctaaattgtatatttttactgtatacaacatgtggtattgcaacattcctatttgtgggttggctaaatcgatctaataaacatacacatcagttcacatacttactactgtttgtggtgagaactcttaaatctactctcacagtgattttcaagaatagaatatatcgttattaactatagtcaccatgttgtagcatagatctggaagttattctgtcaaactggaattttggacccctctatcaacatcctcccaagatataggaataaatgtgagcacatcaaaagacacccaaaccattacttattataaaaattcataggaatccacagtgagacactacttcaaacactggattggccatattctgaaaaataacaaatgtcaggaagggtgtgcggaaagagaaccttcacgcactgctggcatgattgtgaaatttttcggtgactgtgaaaagtggtttggaggccgggcgtggtggttcacgtttgtaatcccagcactttgggaggccgaggcaggaggatcacctcaggtcaggagtttgagaccggcctggccaaaatggcaaaaccccttctctactgaaagtgcaaaaattatctgggcacggtgcaggtgcctgtaatcccagctactcaggaggctgaggcagaatagcttgaacccaggagcagaggttgcagtgagccgagatcgtgccgctgcactccagcctgggtgacagagccagactccatcaaaaagaaagaaagaaagagagagagagagagagagagagagggagggagggagggagggacggagggggagagagagagaggaaagaaaagaaagaaagaaagaaaaagagagaaagaagaaaaagaaaaaagcggtttgacagttccttaaaagatgaacctaggaaggcttatatgctgttggtggtaaattagctcaacttctatggaaaacagcatagaggtttctcaaagaactaaatacagaactgccgtttgacccagcaatcccactactgtaaaagaaataattatattaaaaaagacacacgcactcgtatgttcaccgtggtgctattcacaatagcaaagtcatggaaccatcctagatgtccatccatcgtggcatggataaagtaaaagtggtaaatatatagcccagaatacagcatagccataaaaaatagtgaaatcatgtcctttgcaggaacatggatggagctggaggccatgatcctacgtgaactaactcagaatcagaataccaaacactgcatgatctcacttacaagtgggagctacacaataggcactcatggacataaagatggagataaacacagggaaacccaaaag[142 bp omitted]atgtgcagaaaccccatctctactaaaaatacaaaattagctgggcatggtggtgcatgcctgtaattccagctactcgggaggctgaggcaggagaattgcttaaacctggaaggtggaggttgcggtgagccgagatcgcaccactgcactccagcctgagcaacaagagtgaaactccatctcaaaaaaaaaaaaatctatctatctatttatatatatatatacacacacacacatacatacaccaaacaagcacatgtaccttttgaatataaaataaaataaaataataatataaaataaaataaaaaataaacctagaattactctatgatctagaaatttcacttctaggtatgtgactaaaggtttaggttatacaagacgaatgaagtttgcaatgtaccctacaacattttgtctttagttaacaatactgcatcatgaagttaaaaattggtaggagaattaactcttcctaccacaataaaaaaaaagactgatagtagatattgtgaaaggaaattaaattttgggaccccacactcatttagctaagggggaaagtcaagctggggactgggtcacacaaacctgcctctccattttggttcgtgaataagatggctacaaggtgaaaagctacatgcctcccccacgttttgcccacaagaagattcctagtgagctgttaaaatttcaccatggcaatgtaaattgatagcttatctttccaatgtatattgatagcttatctttccagtgtatactgatagcttatctttccagtgtatattgatatcttatctttccagtgtatgatagcttatctttccaatgtatactgatagcttatctttccagtgtatactgatagcttatctttccagtgcatactgatagcttatctttccagtgtatactgatagcttatctttccagtgtatgttgatagcttatctttccagtgtatattgatagcttatctttccagtgtatattgatagcttatctttccagtgtatattgatagcttatcttttccaatgtatattgatagcttatctttccagtgtatattgatagcttatctttccagtgtatactgatagcttatctttccagtgcatactgatagcttatctttccagtgtatactgatagcttatctttccagtgtatgttgatagcttatctttccagtgtatattgatagcttatctttccagtgtatattgatagcttatctttccagtgtatattgatagcttatctttccaatgtatattgatagcttatctttccagtgtatattgatagcttatctttccagtgtatattgatagcttatctttccaatgcatattgatagcttatctttccagtgtatattgatagcttatctttccagtgtatattgataacttatctttccaggtacagtctccccagcccatcagacacaaatgcatatctgatcattcccccacccaattttgtctatgtttatcttatgtaaaatgcagattcactgcatattttcctctgccccatttgtttttgtcgtctgatgtaaaaagtgcagattcactgaaccagacaaaggcatgaatgactatttttaaaaaaaatacagattcactgagctagacaaaggcatgcgtaactatttttccttaccctcctcttacatgaaaattgtgtgcttctcaatatcccgccctttaccctttaaatttggatccctcaaaatcatcttcagagaaaggcatagatctgtctcccaggcacatctttaactttggcaaataaatctcctgaaatgataagagacttatctcattggacaatatccaaacacttgtgcccaagtgtttatagaagcattattcacaataaaaagataaaagtatcacaaatgtccaccaaccaacgtgttgcatccatatgttagaaatttactcatccataaaaatgaagtactgatgcatgctgcaatttggagattcaaaatatgaagctaagtgaaagaagccagatccaaaggtcacatactatatgattacatttatataaaatgtccagcagctggaaatccacagagacagaaagcagattgatggttgcctggggctgagcaggggtagggagaggagagggactgctccgtggaacggggttccttttggggtgatgaaaatctttgggaactagaggtggcagttgctgcaatgaaaatctactaaatgccacagagttgtatatatatatatatgtattttttttttgagacggagtttcacttttattgcccaggctggagtgcagtggtgtattctcgcgtctctgcaacttccgcctctcagtttcaagcgattttcctgcctcagccccccaagtagctgggattgcaggtggccaccacaacacctgtctaatttttctgtatttttagtagagacggagtttcaccatgttggccaggctggtcttgaactcctgacctcaggtgatccacccgcctcggccccccaaagtgctgggattataggcgtgagccactgcgcccggcctagagttgtatacttttaaagggtcaattttacattatctgtattttacttcagtgaatggaaatttaagaaaaaagagcatggttctatgcagatttcttttatcttaaaaagttgcaacatgacccagtgttttttttttttaatgtgaggtaggattcctaataagtgagagacgtcctaagtcccacagtgttcagacatgaagctgatcttttcaccttacatcttaaattctaatgtggctgagtacagaattcgggatgagctccaggattcctgcagtctgtaactttttctgacactttaccattccacccgtgatgacggattgttcctgacttacctttggaacataaaggctcttacaccacgtgtctggatctggtaaaagagattacacgagattgagagccttacatgtctcaggcaatactcatcctcaaaccaaccctgagatatgggtcattatcttcttctataaggaggaaaatgggaaagaggtgttacatgatcaaggtcaaccatcagtaaattccaccctcatgtcttacattaacacctgttcatttcctccagggatcactcttgcccaaagcatggagacagaatccatggtatcagctgagggctgtgagcagggaagaaaagaggtagtaaggaaggagaaatgactcagatgttttgacagagagtgaccctgtttgccccaagaacacttgcgggttacagtcctaatcttacccccaaagtgttcccagaccaaactgagggtggggctgctatttctcatggcccaataatgagatgcggatgaactggggagggagagagtttttatttctgttaccggttacagggagaaggcctggaaaacattgccagaccaactcaaaattacaaagtttcccagagcttatataccttctaagctatttattaaaaaatgcagctattttctaagctatcttctaagctaagctaagaagatagctaagcttcttctaagctaagctaagaagatagctaagcttcttctaaactatctaagctagataagcttccaaactatcttctaataagtttagaagattctaagccattaagctacctaagctatagtcttctaagctatcttctaatctaagcttagaagcttagctatctaaactaagctaagatattctaagcttctaatatccatctttcacatcacccatttcctgcatgggatatggcacgccagagacccaggggatgttttctgcatgaatctagtaataaacaaatacctgcatccctcagggctgataaagagtctataaacctcagatggagagtctagaatgttagaacataaaccagggaatgtgtcagatgcctaagaaccttcacagcaattctagcaattcttcataaaagcagctgtcatttactgagcatagttcatcaggttatctctaggcatataatgaaaataataatcatagtaaaaaatagcccacattattgaatgactgctaagaacatggtagaatttcactttgtacatcacatgtattaactatgtagttccccaccaaaaccatgtaaggtagatactagcactatactaagtttatatatgacacaatagcaatgtgggtaactttccctaactcacgaagttaaaaggggcagagctgtgatcaaatctcaggcttcctggctccagagtcttccctgttagttcaactgattgcttcctatgagaggtagaatataataatctctgattgtcaacccaccaaatatccttacaaagaagacatttttattattgcaattttatagaaaagcaaagtgagcctcagagaggcaaagtgactttcccaaggagacagagatagcaagaggcagatgtaggttttgaaagtactgtgatgtaactccaagcctgttgcttttttttttttttttgagaccgagtcttactctgttgcccaggctggagtgcagtcacgtgatctcagctctctgcaagctctgcttcctgggttcataccattctcctgcctcagcctcccaagtagctgggactacaggcacccgccaccacgactggctaattttctttttttttttttttttgtatttttggtggagacagggtttcactatattagccaggatggtctccatctcctgacctcatgatcatccctcctcagcctcccaaagtgctgggattacaggcgtcagccactgtgtctggccccaagcctgttgctttttagtcaataccctataaactggtttcctgaacatggtctggaaagagatgacctgaggtggatgaggaagagccaactctaaatgccaccctgggccgtgctagtggttgtcctgctgggtgagcggctaacatcataagcttctgaattccattcctattcagaatccatggagtggatgtgtctttttccaatttattctgatgcattcgctaaatatttattagacaccttcagggaatctctatttaggagtctctaagagggggcccagctcatacaaatgtatcaactaacacaccagaaaacagtggaagccttgttgcttcctggactctgaccatggtgctgaaactagagttcatggcaacatcccagtcagtgctgtggacagcgaccacaggagccactctcctggggctggggcctgatagaggaaataggaatggtgtctagatacagggccaggtctgttggagaccttgaataggagccaaaattgaacaggatgtggggaagctcaagaggttgatgacgtctagctggaccatggaatgttgctatctaaataggcaattatttttgtactctacaccagggtaggcagacaggaagccaagagggaagcatcctggaacttccttcgtcatacagaatactgagtttccttggctgctcatgagtgtatattatgagtgcaataaagtttgagtgcgattatcccttagactaaaatctgtttttgcaagagttttcttcagagaaatggaaccaatcagatgtttatttatgtatatacctatcctctgtctatctagctatctgtttatttctctaggaatgtgcattatgaatacaatatggcccctcttactgtgggccaacgtttgttccatgttttagccaatgaaccagacaaactgttagagccatgtctagctcactgagatgcaacattaaatgcaggatctctccttagtaggtccatatcaataacattggcctggctcaactttatcttcctttcaccattatccaacacccttaatgtccattcgcacacatgttccctagatttctaggtgtataaatcagaagaacttagtagtcactttggagtgtagcacatttccccatggatcacacattgaacctatggcttagaagcaaagatgggtagtgggggcggatcctgaggaaaattagcactgtcttgcatggcaactgcctccgcggaggccactattgtttcctcagacagtgcagggttaatctcctcagatgcacggggagagaatgcttccattgtcaaagagcatgattaaggaactcactgtccttaccttcatcagtgtctttcacacatccctattccaaatgtcaagattccacaccttccgaatcaatacccttaaagtagacaccctttgaggctgggaattccatttgtattgtaatttagccacttgaagggtgagtttctgggtttgctttttctttttctttttttttttttttgagacagagtcttgcccttgtcccccaggctggaatgcaatggcacgatctcgactcactgcaacctccacctcctgagttcaagcaattctcctgcctcagcctcttgagtagctgggattacaggcaccagccaccacacctggctaatttttgtatttctagtagagacgggatttcgccaagttggccagactggtca[131 bp omitted]atcttttagggcagatatagaagtcttagctcatttatgtttgcacttgaactgaaaattcaaatctttgaattcatcctcttctttccccaactttgtccagtgacaacccagccaatctcattatgctcattagttttcaaaaacattcaaaagtattatgtacatgatcactcagattcttttttttttttttgagacggagtcttgctctgtcgcccaggctggagtgcagtggcatggtctccgctcactgcaagctccgcctcccaggttcatgccattctcctgcctcagcctcccaagtagctgggactacaggcgcccaccaccacacctggctaattt[144 bp omitted]agattcttataaatgtttgttaggcgtttccaatgatgacatttggtgtatccctatggccacatcatgttatgcactatcaacactactggaaatggagtcattagtgtttttaaatctaatcaaattagaaagccgatttcagaaactttggatccaattcagaaaactcatccttaaaaattctgttcctttggaatcatccctggaaccaaaatgatttttttttcaagggttctccagagaaattgaaccagcagaatgtttatttatgtgtctatctgtgtatctatgtatctatctatgtatctatccatgtatctatgtatctatctatttatctatctatctatttatttgtttatctattcatttacctaggaattggctcatgtgattgtaggagcttggtgagtccaaaatctgcaggacagtagagtatcctggagactcaggaaagagttgtagcaaactaaaaaatccaaagacaatctgctggaagaatttcttcttgctcaggggagctctctgctattactttattgttattttgctcacaagacatgtatcatcctataacatattggattttctattaatttttgttgttgtctaatatccatctttctcaactataatattgattcaatacagacacttttttagaagtctttctgtcttttttctgatacatcttatacaccaagaatcacgtttgacccattagatacttaatgtgtgcccatgaaaacagtgaataaaagtgtctccacttcttccaagtttatttttaacactggagcaaatgatttctacttgattctctctttttttctcccttccaggctgcctttagtgcaaagtcctcagaatggaaaaatattcttgggggaggcaaaaccttaaggttggcaagaaacaaaccccagccttatccttactttccttctctcagttagatctcaatgtccttggctgcaatgccgtctctacctagtctacttcaagcttcccagatatgatttcctctctaagtttctctgtctcttcctgtctctgtctctctattgttctgtttctttccatctctctctttcttgctccaactttctcagtcgactaaaactaatagctacgaatagctttcagtaatttgaacatttcacggatgtttttctagatcaactgaaatccctatgcaaacactgtcactgtacttgcagatgaaatgataatcacttcccggcaagaaaaggatctcatggtagtcttaagcctttatctcagggttaagatgcccccttttgtggaggtgcttagactgtgactatggcagttgctttcccagcaagaaactgcatttggtaagtggaccttctttcagttagagagccatattcttagagatgtagaatatttgttgcaacatatatgtgtgtgtgtatatatatatatatatatatatatatatatatatatatatggtgtaaacatcccggtctatttcccctaaggtcaaaactgaacatggaaaagaaacatggggcaggggtattttctgagagttcctgagacacagaaccaccccagccttcccactcagggctgcctggcatctcctgtttaccttctctgtcatagccccatctgaaagactctgtctgaataaatataccaaacctcatagtcttagctctcctctttgtacgaggggtaagagtgtgttcaggtcttggctcctgttcacacacctgttgtctaatggcaactggtacttaggacatttgaaatatctctggtggctgcatgctgcactttggttggcaatggctgtacgtctctgaaaaccttctgtgatgattgcaaaacggtacactttcatctcctttcttatgggttccggggagccgaatgcacttgatttcaccagtaatatatgtctatagacaatttctcagatcggcgtgaagaaggtaaattatatctttcatttagaaaaatataaatctcacttttacaaaacgtgactaagaattgtcaaggcttagagagcaggaataatcagggactatatgggtgttcatgtctaataaatgcaactctgatccttaaccgtatttaaaagcgctttcagagttccgaaaccttttcatctgctccagattcactgggttctgaagccaaagctttctgaaactgttcctcctctcagcccctaagtggtgaacgcttggtctgttctgacagctgagatcctagccacgggagcgtgaggtgaggaatttcctgtcaccatcccagaaagtaaaatatagcctcattatttcctaattgtgtttccataagaaaaacaaagaattcgataaaagaaacaaagaccagtatttactttttcataaatgattgtagttactgaaggacatatggggcccgtaatcacaacgggtctaggactcacaggtattttctcgtctccattatttaccataattgtgtcattctcactcctgcttacatgatttatttggtataatttaaatgtatttgtatgttttctctatgacttaatgggcaacatgcccctttctctaacttgtgtttgttggtttgttgatctctgatacaaatttgctaaatatattctagttgttgttataaaatattttctttccaagaaaatttttcaacaggttcatgtgcacaccatatatgaaattcatattcttttcttattctcttatttttctccccatcctctacaacacttgggccaaactgttatggattattgtgtatccaccaagaaatggctttgagtttttaaagtatctatttctctgaactaatctgtaatttccaagaatctaatatttctcaatttttaacaccaattattttactttgtaatttaacaacttgttaattattaaacaagtaaaaaatgcaaaaataaaaactatgttttgatagtttctaatttatattctttggaaaatgtctaaattttaggaaattaaaatttttttcgaattgaatgtggctagaaataataatttttcactgcatggcattacgtaagtgtaatagaattctactctcatcctactttagataatgccaaactgagaaaccattattaatttattttgtttttgtctagacatgaaaatgaaaagttgccatcagaagaatcattatggaaagtgaaaatatggtgctaaattaaatatgtggcaaataaatgtgtttttttaacttttaggttcagaggtacatgtgcaggtttgttatataagtaaattgtgtgttacaagggtttgaagtacacattattttgttatccaggtgataagcatagtaccaaataggtagtttttctgtcctcaccctccccacttcctcaaccctcaaggaggtccccctgtgtgtgattaccaaggaggccccactgtgtgttattacctcctatgtgtccattatgtattcagtatttacttccaacttataagtgacaacatatagtattcagctttctttttctgtgtcagttctcttagaataatgaccaccaggtccattaatgtggctgaaaatgacagtatcttattctttgttttgaggcagaatctgtctgtcacccaggctggagtgcagtggcactatctcagctcactgcagcccccgcctcccaggatcaagcaattcttgtgcctcagcctgccgagtaaatgggattacaggtatgcaccaccacacccagctagtcttgttttgttttgtcttgttttttgagatggagtctcgctgtgtcgccaggctggagtggagtggcgtgatctcggctcactgcatcctctgcctcccggattcaagcgattctcctgcctca[134 bp omitted]gcctcccaaagtgctgggattacaggcatgagccactgcatctggccagtttttgtattttttttttttagtagagatgaagttttgccatgttggccaggctggtctcaaactcctgtcctcaagttatccacccgcctcggcctttcaaagtgctgggattacaggtgtgatatatatgatatatatgtgtcctcatggacacagagagggaacttcacacaccagggcctgtcagggggttgggtaggggggtaggggagggataacattaggagaaatacctaatgtagacgacgggttgatgggtgcagcaaattgccatggcacttgtatacctatgtaacaaacctgcacgttctgcacatgtatcccagaacttacagtataataataataataataataaaaagagtggtctctgggctataagttccctgcagaggattgcatcatctattttgtcactgcccccaccctaatgtttgtaggctcatatattatgccagttaatatgcaaagacttagggattcagtactgaataaaaatgagaatggccatggcctcatattgcttatgagactgccaaaaccgaacgtggtgtacataattacccagatgtatggtgacttcttaaaaaatgaagcatagccttgccatgtaatcttgccattttacttctgtgtatatatccaggggaagtcaaagcaaatacttgagcagatatttatacctccatgtgcacagcagcattacttacaacaaacaaaaagaataaaccacccaatgttcatagatggatgagtggagacataaactgtagtgtagacatacagtagagtatgtatgtcttacaaggaatgaaatcatgattgccacattctacaacacgggtgaaacttgaagatgttatgcagactgaaatcaggcaatcacaaaaagacaagtattgtatgattctatttatatgaagtgcatagaataggcaaacccatagagacagaaagtagaatattggcttccaggggctggggttgggggagagaaaatgggaattggtatttaatgcatacagattttcagtttaggatcatgaaaaagatctggagatggatggggatgatggttgcgcaacggtgtggatgtacttcagcaaggtgctgtggctcacgcctgtgtgtctgcgtgctagggtctcgggggttttataggcacaggatgggggcgtggcaggccagggtggtcttgggaaatgcaacatttgggcaggaagtgcccgtcctcacctaggtctgtgagggtggagccctagccagggaccacgccctcctctgcccagcacttcccttccctcttctgtattatttaaagggactacacccttcccttcccagcacttctttatcaccacttagaaaggccattatcaaaaagacaaaaaataacaagtggtggctaggatgcagagaaaaggggactcttgtgcactgttgaaggcaacaagaaggagtgtggtcattacaggaaacagtacataggttcctcataaaactaaaaagagaaccaccctatgacccagccagcccagttctgggtatagatcgaaaggaaaggcaatcagtatattgaaaggatagcttcaccctggtgtttactgcagcactattcacaataaccaagatttggaagcaacctaagtgtttatgtacagatgaatggataaggaaaatgtggtacatttacacaatggaatattacccagtcgttaaaaagaatgaaatcctgtcatttgtggcaacacggatgagcctggaggaaataagtgagataagccaggcatagaaagacaaaggtagcgtgttcttactcatgtgtgggagttaaaacagttgatctcagaagcagagagcagagtcgtggtaactagaggctgggaagggtgggaagaggggagagggaaatgctggttaaaggatacagaattacagctagatggaggaaataataagttctggtatcctacagcactgtagggtgactatagttaacaatagtttactgtacagctagatggaggaaataagttctggtatcctatagcactgtagggtgactatagttaacaatagtttactgtacagctagatggaggaaataataagttctggtatcctacagcaccgtagggtgactatagttaacaatagtttactgtacagctagatggaggaaataagttctggcatcctatagcactgtagggtgactatagttaacaatagtttactgtacagctagatggaggaaataagttctggtaccctacagcactgtagggtgactatagttaacaatagtttactgtacagctagatggaggaaataagttctggtatcctacagcactgtagggtgactatagttaacaatagtttactgtacagctagatggaggaaataagttctggtatcctatagcactgtagggtgactatagttaacaatagtttactgtacagctagatggaggaaataataagttctggtatcctacagcactgtagggtgactatagttaacaatagtttactgtacagctagatggaggaaataagttctggtatcctacagcactgtagggtgactatagttaacaatagtttactgtatattttcttttttagatgtttttattatactttaagttctagcgtatcctagaagctttattcagtactgaatcccaaagtctttgcatattaactggcataatatatgagcctacaaacattagggtgggggacagtgaaaaaataaatgatgcaaccctctgcagggaacttatagcccagagaccactctttttttattattattatactttacgttctggggtacacgtgcagaacgtgcaggcttgttacataggtatacatgtgccatgttggcttgctgcacccatcgactcgtcatttacattaggtatttctcctaatgctatccctcccccagccccccagccccagacagtccccagtgagtgatgttccccgccctgtgtccaggtgttctcattgttcaattcccacctatgagtgagaacatgcggtgtttggttttctgtccttgtgatagtgtactgagaatgatggtttccagcttcatccatgtccctgcaagggacataaactcatccttttttatagctgcatagtattccatggtgtatatgtgccacattttcttaatccagtctatcattgatggacatttgggttggttccaagtctttgctattgtgaatagtgccacagtaaacatacgtgtgcatgtatctttataatagcatgatatataattctttgggtatatacccagtaatgggattactgggtcaaatggtatttctagtcctagatccttgaggaatcgccacactgtcttccataatggttgaactaatttacactcccaccaacagtgtaaaagatttcctgtttctccacatcttctccagcatctgttgtttcctgactttttaatgattgccattctaactggtgtgagatggtatctcatagtggttttgagtttattgtatgttttcaaagagctagaactcctgggctcaagtgatccacctgccttggcctcccagagtgctgggattaagtgcgtctttattataacttataattgacacataataattgtatatatttgtagggtatagagttgatatttcaacacatatatataatgtgtaatggttaaataagagtaatgaacatatccgccatttcaaacatttatcgtttctttgtgttgaaaacattcaaaatcctctcttctagctatctgaaaatatacaataaactcttaatgagtcaataggttgtcgttggtggcacttcttgtggttatagggattactctttgctgtccgtgtttgttgaatggttcatttcttacacacctaattatccatggaaggtagttcttagtgctctcctgggggtcagactgaaaaagaggggattgttccagctatccctgctgcatgatctcaactcctccaaacatatcatctgcttagggttttgcccagcacaggagggtctagtgtgaacctcacactcacacgtgggacagacacccatatctgacaatgtcgcggtgaatctgtttcacacaaacaagggagatgattcagtgtggaccacgggcccatgtcaatgagcagagatatttccagcgcctgtccacacacacaggggaggaggaaccacagcttccagcctcacccaaagccctgactcctccctgcctgtgaggacctggggttcctcttctgtcccacacacagaggtggaaatctcccccactaatgagccctgggtggtcccaggcaccagtggtccctcagctctggtctatgatctgtcttacggcaccctgtctatttcaggaatttgttatttaactttttctacattaagaccatgactacaggattcagaaatatcgtaactaggtttctcagtgttcaaagttgacgtcggctcttcatgggggcatcaatcatcgtcctccactgtggagcccaacatcaggatcctctcccatccccaccctcctgtcttaactggtctagaaattaaccatggctgagcccctcccatgtcctgggcaccactgacccccatagccactgtgatgagtggggatcatgacaacaggctccaaacgtggaaattgaggctcagggatgggatattacttcccaaggtcacacaggcaggggatgataatcaggaattaaataaaagtcacctcccaacccaatgtccgaaatcagagctcaaacctaacgtaattgctccaaaaaccttaaacgtggattaaggcacagaggaaggcccaggaagtgaggggcactgagaaggcaggaatgacttagaggtttgttctcaggggtggggggtggatgctgctgcaaaaagaaaggaaggaaagacagagggaaggaaggagggagagagggagggaggaagaggacggaaggaaggaaggaaaaaaataggaagtttggtagaaaggaagagactgttcttgaagggacaagaaagggactgtttggcagaaaggaaacacacactccagggacagaaaaacatatgttttattctctttattccctgcatctctcttgtgttctcactgccacatgcagctcagcctcggctgcacagccaggtgtcaggtgcgtctctgctgatctgagtctgcctgcagcatggacctgggtcttccctgaagcatctccagggctggagaatcactgaccatggtaaggaccccgcaacgctgagctgatggatgggctgaaggagggagggagaccccatggggaggctctgagcgggaggaggtcaccctcgcctgaaaggggctgactccggaaggcatcaggtctatttgctgttgtgtcccggctctcggtaagataaagacagatcaggcagacagtggcctgggggcagggagaccccatttctctctgaaatgtctgcagagagcctggtgcccacccccatctcagccctggggaaatgagagccagcctcctggggagggcagtttccgttcctgtgggctgcggatgagataaccccatgacaagaaagacccagcctctgaggggccacaccctgtgtgtctctctgtcctgccagcaccaacggctcatccatttgcaaagctgaaaggaggcagaggagacgccatgaccgccgccctcacagccttgctttgctttgctttggtgagatttgaagaggagagaggaaaccccacaggccctggtccatcaagagatcccagggctttagggagctcccaggcaggggaggacttgctcaggcttcacggggcaaatccctcactgggaattctcttccagggctgagtctgggccccaggacccgcatgcaggcaggtgagtctgtccccagctctcccaggtccctcctcctcaccctggacagttggggatggagacagcagttctgggcaggcagctgggatgatctgaggggtggggaaggtcttgggatccaggctttgatttccttccatgtactctccccaggcccaccctctgggctaagccaggctctgtgatcagctggagaagccccatgaccatgtggtgtcaggggaccctggaagcccaggagtaccatctatataaagagggaagcacagagccctgggacagaacgaatccactggagaccaggaacaaggccagatactccatcccatccatgacacagcaccatgcagtgagatatcagtgttactatctcagccctgcgggctggtcagagcccagtgaccccctggagctggtgatgacaggtgagaggacactcaggggtcccagccccaggctctgccctcaggaagggggttggctctcaggggtgtctccctctcacagcccagccctggggatgatgtgggaggtgggagccccatttaacatggtgcctccttctctcctaggattctacagcaaacccaccctctcagccctgcccagccctgtggtggcctcaggagggaaagtgaccctccgatgtggctcacagaagggatatcaccattttgttctgatgaaggaaggagaacaccagctcccccggaccctggactcacagcagctccacagtggggggttccaggccctgttccctgtgggccccgtgacccccagccacaggtggaggttcacatgctattactattatatgaacaccccccaggtgtggtcccaccccagtgaccccctggagattctgccctcaggtgagggagccacggccttctctaacacactttccggacagctgacaggttgtggggagtttggctggtgactgaatctggaaaggacccacagtgatgtgttgatggatgggctgaaggcatgagggagaccccatggggaggctctgacatgggaggacagagctctccccctgtcctggcccctggagagaccctgaccctccagtgtggctctgatgtcggctacgacagattcactctgtacaaggagggggaatgtgacttcctccagcgccctggccagcagccccaggctgggctctcccaggccaacttcaccctgggccctgtgaggggctcccacgggggccagtacagatgctccggtgcacacaacctctcctccgagtggtcggcccccagtgaccccctggacatcctgatcgcaggtgaggagcccagcgggttcagtcagggacccgggctcggcacaggcattgccgggggagcccaggtggtgatggccgggatgaggggtgggggtcccaagggagggagagacagacagagacaggggatggggggagggggagactcagaaaacagacacagagactgagggtcccagggagaggtctggggaggtctcagctcagaacaaggtggggcagcccctcacccatctgtcttctgtccaggacagatccctggcagaccctccctctcagtgcagttgtggcccacagtggcctcaggagagaacgtgaccctgctgtgtcaatcacaagagtggatgcacactttccttctgaccaaggagggggcagcccatcccctgctgtgtctgagatcaaagtacggagctcataagtaccaggctgaattccccatgagtcctgtgacctcagcccacacggggacctacaggtgctacggctcactcagctccgacccctacctgctgtctcaccccagtggccccgtggagctcgtggtctcaggtgagggcgctgaccctgtcctctctgagctcaaaggctcagctcaggccctgcccccagcagagctctggacactaaggaaagaggggagtgaagggagagggtccgcaggggagggtccagcccatgggaagatggaaatagacagggacctcccacccctggctcccacccctgaagtctcagtagagtaaagtgcagggagggctgggaggagacggggggtgaacctcaaaggagttgagattagactgagggtggaagacggaggccccacctgctcccatcctggtgtctccacctcagaatcagagcctctgtgtcccagtccccaacagacgccctcctggagagagaagcatccaggctgccggtgccacctgcatccacccccgacccccccccaccccgccccacttcctgctttcccctgcagcctccccagcactcagcgcacacctgagcctcacagggacttgcacgtgctcccgcagcagctcagggaatgtgcaccgctcctcttctgcgccgttgacattttttatttgggtttttaaaatctcatattggcctttttgtccaagctggtgaaagtagatttgcagcatcacctatttttattctcacccggtttcgtaatagccctgatctcacgtgctccctgaggttttgtaaacttcaggtagaaatgtggacttccttcgttctggacatttgctatggagggggtagggcttatcttttcagaaaaagtcaaatgactggtaccactccttgaaaccctacagcactttccagacctcagagggagggagagagaggcagagacagagacagagagacagagagagagatattggggccgctctttcctggccggttcatcctggcctattctcaatccaccaaggccccgaagctcatctcccctcctcctctgcctcctcctccaccctgtagacaagcggccattcctttctgaagaacaggctgagacctttctgggacctgctctttctggagcctctgttgctccctgtctgggtctccacacgcctccttcctggccctttttcctattgaggaatcagcttcaatgtcacctccaagtgtgaccttcactgacgacacagctcagcccagtcctgcctgcttctcatttatgtcaagtaattaaccaacctacaccatgcggctgaattccttctctctctcttccactctctgcatatacgtgtgtgtgtgtgtgtgcgcgtgtgtggtcacaccaacatcttacgtgacattgaaacctagttatccgtatatctatacaaataatatatattcacacataaatataggtctctaccaatatatctaaaaccattgctacgactagtaaatttccactgctgtgtttctatatgtttgctgtttgtctccaggtgaacccacacttcaagaaggcagagatagtttttaaggcccactatatatataaaacagatatatatttgtgtttgtgtttttctgtgtgtgtatcacattctacctgttgctgcctatacgaataattagctacctagagattaaatggacaatgaaactccaggtgaagtggctgagggcatgaaggggaggcagccccagaatttcacccctttgtgcttctgacattgaggctcccctgatgactaaccctcatccacggagcctgggtcctcagctggtggatccgtgaaactctcatctccgggggagttggctcatgttctcctgtgtcccaggctgcacagagagcacacaggccttagtgacctctgtactggggaccactttccttgcagatcctgagctctcaggatgcaggaaaactctctcccagatgactcaggagcaatgtttaaatccatagaacacaggaaaactgaaatcgttcaatgaggagactagagggaatcctgctagcggaggaagaggttttttttttttttttttagaaattctgtaaaagtcacatcatgagacattaagtaataaaaaaaaaattgcagagcccaggtgagaggctgggctcaggtctctttttctctgttttgattctctggagcagctgataccctcagcccatcacaaaacaagtctgactctgagactggtatgtgaggagatactctcagtgatggggctggcactgagggttgggtcctgtgaaggggaggtgggtgccctgggtggacaatctgatccaccctgacctctgtgacctctttgtccaccatccccagcctcacaccttcaggattacgcagtggagaatctcatccacatgggcgtggctggcttgatcctggtggtcctcgggattctgtcatttgaggcttggcacagccagagaagcttcccaagatgcagccgggaggtgaacagcagagaggataatgtactttatagagtcgtgaagcctcaggaacagatctgatgatcccaggaggttctggaagaaaatctagggccgatgctatctggactgtctgctggtcatttccagaggaaggaatcaatgtccgagtgcagggacattttctggggtgatccatggagaaccattaaaatgtgatacctttcctctccattaatgttgactttccttggttggatctgcctcttttcccacacttagacatgaggctccatcccacatggcagcgttgggtccacacctctgcacacctgcatgctctggtccatggcgtgtcacacagtcctcttcatttctcattgccacacttcctggtgtactttactgggtcttcatgtcttcagttcagagttccgcacctggtttaggaactaattcaacgggagaagatcagagtccgaccaggaaaagataaatgcaccgtgatgccctcacctcctgtgtggaccctatgagctcttccctccttatcagatgctatctgtgtagtttctcctgaaatatcaccacctggaatcaacacactggcatttgaagtcacgacccaatggtatgctaattctgaaaaagacattttttgaaatgctatgattagtggcatttaccaatttccttgacgtaaattcttttttcatggccataatcaagatgccaacgagacatccctgaatgcagggttgggaagcgttggacagacttgtcttcactcataagcaccaggcatctgatagctcacgtatacatcttattaccttccattttagagtgaataatcatttctacttcagtattttggcacaggtaaaagcagtcccattactgcgcgtatacccaaaggaatataaatcattctattgcaaagatacatgcacacatgtgttcatcgcagcactattcacaatagcaaagacatagaatcaacccaaatgcccatcaatgatagactggataaagaaaatgtgagacatatacaccacggaatactatgaagccataaaaagaaacaagatcatgtcctttgcagggacatggatggagctggaaaccattatcctcaggaaactaacacaggaacaggaaatcaaacgctgcatgttctcacttacaagtgggtgctgaacaatgagaatgcgtgaacacagggaggggaacaacacacactggggcctgtcggggggggggtggggtaggggtagggagagcattaggaaaaatagctaatgtatgctgggcttaatacctaggtgatgggttgacaggtgcaggaaaccaccatggcgcacattgacctatgcaataagcccacacattctgcacatgtaccccggaacttaaaataaaaataaaaattaaaattaaattatgacaccatgatcctagcatatccaaaaaagacaaaaatgccaatatcaaa[137 bp omitted]cgtggtgaaaccctgcctctactaaaaatacaaaaattagccgggtgtggtggcactcgcctgtagtcctagctactagggaggctgaggcaggagaatcacttgaacccgggaggcggaggttgcaatgagctgagatcatgccactgaactccagcctgggtgacagagcgagactccgtctcaaaaaaaaaaacaaaaaaaaaaaaccctcaaaagctcaggcagcaaaagcaaaaataggcaaatgagatcatagcaaactgcaaaccttctgcacaatcaaggaaacaaacagcagagtgaagagaccacctacagaatgggaaagaatatttgcaagcaagagattaatctccagaaaatacaaggagctcaaacaatgcagaggttttgaaggatggtgatgagaaggttctgctacttacagaaaggaagtttaggagaaacaaaaccacaaacctaggtggtgggatggcttgatctgcttctgtctgtgactcacttaacagtcttaaacacatctccctaagcctccttcccccggtgggattcctgggtcttgtgaggacctcatcggtccctctggtaaacccaggcacagagtggagcagctcttgttttctcaggatcttccccttcacatacaattaacgcacccacacgatgctactcttagaacccttcaaataaatgtttcccggttcattcactaccagaatccaagctcagcttgttccccagcttaggactgagtggtatcttggaggtagtttccaccatagcccccttcctctgctataaggctcagtgacacaccagagacaccccctccagccaggctcctggaaggtctggatgaagactgggatgctgaggcattgctcagcaatgtggcttaactcaaacttctatgtgaaacttccaaccactttcagcaaggggtcacttccagcgtcttggggtgtgagggcactttggttggtccctgcaatatcagaccctataaagatcctacaaacatgttgcagactctttgaagattctggcactttcagacatgctgttgggaaatggtgacacccataaccttctagttccaggacagggagccttagcccagggctatgttttctgagggtcctcaaagtaaacagttctatgtgccaggagaaccctaaatctcatatggttctaagggcagaaagccacacacgcaccggcaaaaagcaagagattcaaggaaaagctgagcaaagacagacaggaaaacacacacatgatgagccagcttgtagagctagaactgagatggagagaggcacgagtgggtaacagagtgtgctccccagaacaggtggagagaatgcctttttcatgccctgaggataggctgggtaaggcttgtgctcgacagtcaaggactatttttttccccaggcgtctacaagagaccttccttctcagctcaactgtgccctgcagtaagtaatgatggagagaatgtgactttgctctgcagctctggaagctcatttgacctgtgccttctaacgaggaaggtaaggcccctggacactggctcactggggtgcagagacagagtggggcattcaggccaacttctctctgggtcttggggctggtgatgggacctctagatgctgcagctctctgtcgatggctctgcctgtgagtgatcagccctagatgaccactgttactgggggtagcccatgcctgctgcatgccctgtgaaacactaaatcatatagccacgtctgagggacagcctgctggagacatgggaatcttagggattccagacaaaatgaagcaatgagaaacacaaagaggaaaagagaggttgagtatgacagtggtgtcagggtgtagggtggtagacagggcagctccacactctccactgcttcctgtctggaggcccactttggggtcctacttatccaggtgagtgaaggaagaggtcaggacaaacacaggaggtgaagccagatacagtgtggggagataagcagtggcctcagcctctagcccttttccatcttccagaagcccctcctgagctctcatcacagacagatttcccatttggaaacccagatatttatcatgccgggggggggaggcaatgtctcttgattatggggactttccatcaccaggcacctgctagtcctctctataccttcccttcaggaaaggaattgtccctcatgggattccagggaagagaccccaggacccctatcagtcactagggagatgacagagtagaggaagtcaggggaccaaccctccacagagaatggtcctacttcagtggggtgagggaaactctcactcatccatttgctgtcctgttacctcggaaccctaagagaacttgttagtcacacacagaatctacccctgaatgtggtgtgcaaagtggggctcttagcctccagtgtgaagtccctgggaagatggaatgtccctgtgtgagtgaaggctgtgccaccgcccagctatgtggccttgggctaggcaacccctcccaggtccccagttccccatctgcatcggagactgtggccagtgcgggaatccacaaggcccttcagcctccaaagctctgggacagaggcctcgtccacagggaggaaggggtcagagtgacctgagtccctactcaggagcgagtctaatccactctccatcggggcctgtggggaagggaagatgaagaaacggagcctgcacctggctatgtgggcgcagtagattaaggggaggatgagggttcctgagagtgtgtcatgtggcagagaccctgcagcacactcaggaagggctctggaaggatccaaggaaattttccaagaagagggcagagtaagtgacagagaccctcaaccatggatttcactgaggtgcccatgatgacatagggagaacgggggtgtctgggcaggaagaatatcgtcagggtgaaatgaatggtgatgagcttcgtgtcagagctcctgtggagggaggggcctggcccacatgaaaaggtctctgatcctaccccagcccccagcccctgttctccaggatgacactgtgggaattccatcaggaggggtgtgatagggctggtcttcctggctcgattcacaacactggctggggactgggaacccatggggagccacaggtggaaagggaggagcctcagtgaacccagcaggaacaaacatagggtctgacatgatggaactcacttcctggaggccaagaaagacacttgcgggacaaaagggaaagagcggtggcttgcttagttccattcactgacaacccacaggagatgtccagtccttttttgatttattattttattttattatattttattttattttattttattttcacatggagttttgctcctattggccaggctggagtgcaatggcacgatcttgactcactgcaacctccacctctcaggttcaagcgattctcctgcctcagcctcctgcatagctgggattacaggcgactgccaccacagccaggtaatgtttgtatttttagtagagatgaggttttgccatcttggccaggctggtctcaaactcctgatctcatgtgatccgcctgtatcagactgccaaagtgttgggattacaggcgtgagccaccacacccagccttttgtatttttagtagagatggggtttcaccatgttggtcaggctggtcttaaactcctgacctcaggtgatccatccacctcggccacccaaagtgctgggagtacagatgttagccaccgtacccagcgagagtttcagtgctctatcggattccctgcctactccatgttgcatgtaatgttccacctcagggatgtttctctcctttctgtctccttcctcttctccttctccttttttctttctaatttttatttttttgagacagagccttgctctgttacccaggctagagtacagtggcacgatcccagctcactgcaacctctgcctcctgggttcaagagattctcctgactcagcctctcaagtagctgggattacaggcacccgccatcacacccagctagtttttgtatttttagtagagacgaggtttcaccatgttggccagactggtcttgaactcctgccctcaggtaatccacccgcctgtggccccccaaagtgctgggattacaggcgtgagtcaccactcccagccctgaatgatctttcctctttagtgtgttctcacaaccacctctcactgagctttcttgttttttgtttttgtttttgtttttgtttttgtttttggcagagtctggctttgttgcctatgctggagtgcagtggtgcaatctcagctcactgcaacctccgtctcctgggttcaagcgattctcccacctcagcctcctgagtagctgggattacaggcacccaccaccacacccagctaatttttgcatttttagtagacacagggtttcaccatgttggtcaggctggtctcgaactcctgaccttgtgatctgccagcctcagcctcccaaagtgctggaattacaggcatgagccaccactcccagccctggattatctttcctct[132 bp omitted]gcaagctccacctcccaggttcaagcgattctcccacctcagcctccctagtagctgggattacaggcgcatgccagcacacccagctagtttttgtatttttagtagagacaggggtt[132 bp omitted]tgccagggaataagatagaaaccattccctcaaccacattctagtcatggtccctattctcatgtttccacttctctctctttggtaataaatcaattaattgagaaacaagtagctaaatgttcatcttctgctagtctgcatccccttattttcccagagcctcccctaatgaaactgactttatttactgaacgcaggaaatgggtctctccagatcaggatgactttctgctgggaaatatttgtctttgcatcagtggggaaaaagaaagccgatgtcatgagtggaggctctgagaaaataagggctgtgttttcagtttagacccagctaagttgggagctgacatagatatgatgttgggtccaccctccacgggcaggttttcagacaaaggatccctggcaatcaggggacacctcaggtctgggctgagatgtgtgcagagggcctgggtcctcctgagcccctgcactggggggggaataagagacaggcccagcaaggggctgtccacttcctgtgggttcacagctgtggggacccaggcaggcggcagcaggctctgacttaaccacatccgtgcatctgtctgtcatggagggccatgtggtcacctgtcccacagctggagcacgcagagcaggcatcatggtgtccatcctcactgttcttctgtgcctcagtcagtggtggagagacgagggacaggaggggcactgggctgaggtggggagggtcccacagcagccttgttcaccagagagcctcagggctccagtggctactggtgctccaacaggaagggaagcagccacacctctgtgttccaaatcccccacaggaaactcttctccatggctgagtctgggccagaaagcccaagcacttgcaggtgagtctctgctaacctcccatgcctgacctcacactcagcacctggactctcatctcaggggcttctgaactgagggtgagaaaatcaagagggtctgtgacctgagctgggaatgaggagcgggggaggtctgtggaccccagcctgtggtttcttccagggaccctccccaaacccagcctctgggctgagccaggctctgtgattacctgggagagccccatgaccctctggtgccaggggaccctggatacccagggttactatctcaccaaggaaggaaaccccatgacctggtaccaacagagcccaccagagcccaggaacaagaccaacttcttcatcccatccatgagagagcaccatgcagggagataccactgtcactatctcagccctgcaggctggtcagagcgcagcgagcccctggagctggtggtgacaggtaagaggacactcaggggtcccagccccaggctctgcctgcaggaagggggtcagctctcaagggcatctccgttctaataactcagccctgggggatgatgtgggacgcgtgagccccatttaagacagtgtctccttctctcctaggagcccacagaaaacccactctctcagccctgccgagccctgtggtgacctcaggagagaacgtgaccatccagtgtagctcaagggtgggatttcacaggttcattttgattgaggaaggagaaaacaagctctcctggatgctggactcacaggaactctccaaggggctgtcccttgtccctggccctgttccctgtgggccgtgtggctgccagtcaccggtggatgttcagatgctatgggcattacacgaacttcccctgggtgtggtcggaacccagtgataccatggagatcctggtcttaggtatggatgtcttcctccttgccctatttatttttgagaacttactctcacggagccccatgtaggagggtggaacaagggaagtttgggactcctgagcccagagacactgagtgtgagagacagtgagacctgcagggccaggaggggagaaggaaggggtgtgggaggaaccagccctcctagtcccgactcttctttccctccaggcgtgtctaggaagccctccctcctgaccctgcagggccctgtcgtggcccctggggagaatctgaccctccagtgtggctctgatgtcggctatgacaaattcactctgtacaaggaggggggacatgacctcgtccagggctctggccggcagccccaggctgggctctcccaggccaacttcaccctgggccctgtgagggtctcccacgggggccagtacagatgctacggtgcacacaacctctcctccgagtggtcggcccccagtgaccccctgagcatcctgatcgcaggtgaggagcccagcaggttcagtcagggacccaggctccgcacaggccctgctgggggagcccaggtggtgatggccgggatgaggggtgggggtcctaagggacggagagacagacagagacaggggatgggcggggagggggagactcagagaaaacagagacagagacactgagggtcccagggagaggcctggggaggtgtcagctcagaacgaggtggggcagcccctcacccatccttcttctctccaggacagatccgtggcagaccctccctctcggtgcagccgggccccacggtggcctcaggagagaacgtgaccctgctgtgtcagtcacgggagcagttggacactttccttctgaccaaggagggggcagcccatcacccactgcgtctgagatcagagcaccaagctcagcagcaccaggctgaattccccatgagtcctgtgacctcagcccacgcggggacctacaggtgctacagctcacgcagattcttcccctacctgctgtctcaccccagtgaccccctggagctcgtggtctcaggtgaggccgctgaccctgtcctctctgagctcaaacctcagctcaggccctgcccccaggagagctcaggacgctaaggaaagaggggagtaaagggggagggtcggcaggggagggcccagcccatgagagggtggaaatagtcagggacctcctaatcctgggctcccaccccagagacctcagatggggctaaaggccagggagggctgaaatgagatatggagaaaccttggaggaatcatgcttaggctgagggtagaagatggaggccccacccactccccacctgggctcccctggcggccccaaaatactcagtgcatacctgagacgaaggggagatcatgcacctgctcactgcagcaatgcaggcaaattattcaacagcaaacctcgtgtgcaattcctttctgtcctttattttttatgtccacatatctagtttctctttctgtttctgaagatttcaaagcaatgctggcatttataatttacacatttaatttgttaggtagcgttatgatgtaaaataactgtgctctgattttctttgggattaaattaaatatgtgcattcatgatggagaataacttctcattaataatgtctttgtatccaatacatttaaaattaaactttatacagttagcagatgcttgaagttgtattcataaaaattgtggacattgtgaattttaagcattgttttactacttgaataatttgaaagtctttgattcctttctattttctaaaattagttacgtatggatgagaaagctattggtttgggtatgctaattttagttcctattaacttaccacagacacactccctttcaatcctttccgaaatgatctcttctgatttattgataataattacattaaccacaagaaaatggaggacaaacttgtttgtttctaaattatataatactcttctcacttcaaatatatatgtatgtgtttatatatactcacacactattatatatcttataatatatattatgtattatatatttatatatacactattatatatcttatatattatgtattatatatttatatatacccacacattattatatcttataatatatattatgtattatatatttatatatacccacacattattatatcttataatatatattatgtattatatatttatatatgcactattatatatcttatatattatgtattatatatttatattacccacacattattatatcttataatatatattatgtattatatatttatatatacacacactattatatatcttattatatattatgtattatatatttatatatactattatatatcttataatatataatgtattatatatttatatatacacacactattatatatcttatatattatgtattatatatttatatatacatactattatatatcttataatatattatgtattatatatttatatatatacactattatatatcttattatatattatatatttatatatgcacacactattacatatcttattatatatttatatgtatacacacactattatatatcttattatatattatgtactatatatttatatatactattatatatcttataatatataatgtattatatatttatatatacacacactattatatatcttatatattatgtattatatatttatatatacatactattatatatcttataatatattatgtattatatatttatatatatacactattatatatcttattatatattatatatttatatatgcacacactattacatatcttattatatatttatatgtatacacacactattatatatcttattatatattatgtactatatatttatatatactattatatatcttataatatataatgtattatatatttatatatacacacactattatatatcttatatattatgtattatatatttatatatacatactattatatatcttataatatattatgtattatatatttatatatacacactattatatatcttattatatattatatatttatatatgcacacactattacatatcttattatatatttatatgtatacacacactattatatatcttatatattatatatttatatatactcacactatatcttataatacatattatgcatacacatatgcataatacatattatctatacacatatgcataatacatattatgtatacacatatgcataacacatattatgtatacacacatatttacacctatgcatatatgtatgtatgtatgcgaatgtacctctgccacggcagggaaaggttctatcacacaactacagagcagttaggagaagtgtagacacaaaggaatgcagcaactgagggacatgttggcttaagtctcttcaactcctcacacacctcccccttttttggttgattctcaggagcagctgagaccctcagcccatcgcaaaacaagacagactccaagactggtgtgtaaggagatgctctcggttatggggctggcacagagggtcaggtcctgtgaaggggaggtgggtgccctgggtggacatccaggggtcccgggtgatgttgatctgccctgacctctgagacctcttggtccaccatccccagcctcacacccccaggattacacagtggagaatctcatccgcgtggctgtggctggcttggtcctggtggtcctcgggattctgctgctttaggactggcacagctagagaagtccccaagatgcagcaaggaggtaaatacatgagagaacaatgcacccttcagagtgccagagccttggcaatgaatctgatagtcctaggaggttctggaagaaagtctggaccatcattcgggaaaccgtctactgagaaagtcgagaaggggaggcttgggtcaggttcaggaagatgtctgggtgcctgtagagaacgcttcctccattaaacttccattaaatggcagtgctttcagtcctgctgttgtggatcctccgtgtctgcccctcccttcctttcgctctctgtgatgtgaaggcacgtcccccatggtgggtttgcatccacacccctgcgatcacgtgctctggtccactgtcatgtaatacatttgtctttgtttccaactaccgcattctctaaagtgaactattgattctccatcttttcagttctgagcatagatctggattaaataactggaataggtgggcagatttgtatttgggactttgaaacatgagtctgaggccaggcacagtggctcacacctgtaatcccagcactttgggaggctgaggtgggcggatcacttgaggtcagaagttcgagaccaacctggccaacatggtgaaaccctgtctctactaaaagatacaaaaattagctgggtgtggcagtgagcacctgtaatcccagctgctcaggaagctgaggcgggagaatagcttgaacccgggaggcggaggttgcagtgagccaagatcttgccactgcactccagcctgggcaacagagcaagactccatctccaaaaaaaaaaaaaaaaagggaaatatgagtctgaaatgatgccctagcaccctctctggaccctgaattcccttcactcttcatcggatgatacctgtgtactttgtccagaaatatcatctctcagaatgagcacactaacgctcgaaggctcagcctcatggtattctgttaaactggctctctgaaaaaattattttcttaagaaaactctgaacatataaagccccagatttatggtatttgctgattagtgtggtataaatacgtcctttatggccaacttcagggtgcccatatgacgccattgaatgcacagttgggaagtagtcaaaagaattgtcgttcacacgagtatgaaccagttgtaaagtttatttaaaggttataataatttctgcttcattcttatggtgtagtttcagtaaaattgtaatgtcaaaaatcatagcacaatggagggaaaagaaaaaaataggccgggtgtggtggctcatgcctgtaatcccaacactttgggaggccgaggcaggaggatcacctgaggtcaggagttcgagaccagcctggccaacatggtgaaacgctgtctctactaaaaatacaaaaattagccagacatggtggcgcctgcctgtaatcccagctacttgggaggccaaggcacgagaatcgcatgaacccaggaggcggaggttgcagtgagccgagatcactacagcctgggtgatagagcaagactcagtctcaagaaaagaaaaaagtagcaaaatcattttttggaaagaatattgaacatgtagaattttagtacattaatagtaagagtacaaattgctttaatcaattaaggaagtgtattggaattatctagttaaaaagaggaggcacatggctgtgacccttcttaattatgtacttaattatgtaccctagagataaatgtctacttatgtgtcatgatacactcacaactgttataggaatgctgttcctattagccaaagctataaaataccaaagtccacctacgaaaaaaataaacatagtgtggtaaatagactcagtggaatattacaaggtagtaaaatgcataaatgaaaataacaaacagcaccatacttcaattttcaagcataaagtcaagtaaatgaagtattatttgaaaatgtgtgcatggttatttcattacataaaggtcaaaaggagggtacatttattatttaggaaaacacacctaagatatctttgtaaaatctgtaaaatcaatagtactgtttcccctctttcattccttatcttgaaaatgcttgtctctttttctgccatggctttctaccttgcttgatatattacaattttgtaacctgcttatttcatcatatgtcataagttcacatgtatatcccatgaattattgagggtcttattcatttcaagtggcatttaggtttttaaaaatatcttttggcgaccaggtgcagtggctcatgcctgtaatcccagcactttgggaagc[137 bp omitted]aggaggctgaggcgggagaatggcatgaacccgagagacggaggttgcagtgagccgagatcgtgccactgcactccagcctggcaacagagtgagactctgtctcaaaaaaaaaaaaaaaagaaagaaagaaaggaagaaaaaaaaatcttctggcattaactattaagaaattgcactataaaaagagaatataatgcataagacggcaatttgaaaagattcagatataattttttcttatctagtaaatacttagtaatttgtctaatgcatgccttaaatacataccactttatgcagaggttgccatgagccgagatcgcgccgttgcactctagcctgggtggcagagcaagactccatctcaaaaaaaaaaaagaaaatctcacagaaggagacccagagcttccagcctcgcccagagtcttggctcactccctgtgtgtgtggaccctagggagcctcttctgttccccacagaggtggaaacttcctccttaataaccccttgatggtcccaggcactggtgaccactgagctttgctctctcttttttcttatggttccctgtctacttccagggctatcactttactttttgtgcattagaccatgaataatgttttagaaacattctatcaaatttctcagtgctaggaacaactgaggtttttgattgggtgcctcaaatgtctacccttactgtggagtccgacaacaggattctaacaagtcccaaccccttcatgccttaacctggtctggaaataaattatgtttaagccatcccataccccagccacatcaagccccacaaccactctgagaagtgagatttatagcaaaatgctccaaacaaggtaactaaggttcagacaagggatgttaatgtgtccatttacataaacaaaaaatggtagatgatcagctttccctttgaaatcagagtactaatctgactcattgttccctgaattttagaggcaggacctcaggaggagctaagaatcctaccccaggaaaattaccaatatcagaaaggaaacaatgacatcagtacagatcctacagaattcaaaagattctaagtggacattatgaagacattattcagcttagatgaagtggtcacatatcacaagaaaacaaactgtctaaaacaatctctgaaatacctagacattccctgaatcattgagttattaaataaaatacattttaaaattaaactcttttcaggaaataaacttcaatgtcccctagtgcactctccaaaacatgtagatgggaataaatactgttctgaaagacatttccctggaattacaaccattcaatatattttaaaaggcaatcataaaaatataaaaaggatatatcaggagaagaaatgtaaatggcctaaattccccacataaaaggcatagagtggcaacgtggataaaaagccaagagccaactgcctgctgtcttcaagagacccatctcacatgtaatgacacccacaggctcaaagtaaaaggatgaagaaatatttactaggcaaccaggaaacaaaaaaaaggaaggcattcctattcttatatcacatgaaacacactttaaatcaacagcaatcaggaaggacaaagaagggcattacaaaatgataaagggttcaatttgacagaagacttaactattctaaatatatatgcacccaaatttggagcaccccgattcataaaacaagttattcttcacctatgaaaagagttagacagccacacaataatagtaagggacttcagtatcccactaacaacgtcagatgaatcactaaaacagaaaactaacaaagaaattctggtcttaaagacaacacttgaccaattggacctcatagacatctacagagtactccacccaacaactgcagaatatagattcttcttatctgcacacacaaaaaacatatcatattctaagactggccacaaagcaagtctcaataaattcaaagaatcaaaatcataacaaggcacacaataaaaatagaaaaaaataccaagatgatctctcaaaactacagaaaaacatggaaatttaacaacttgtttctgaatgaatattaagagccatctatgacaaatccacagccaacatcatattgaatggtcaaaagctggaactgtaccccttgagaactcttgggtgaacaatgaaattaaagcagaaatcacaaaacattatttaaaattaataaaaatagaaacaaacttaccaaaacctttgggatgcagttaaagcagtgataagaggaaaatttatagcaatacatgcctcatcagaagtttagaaagatctcaaattagtgacttaacactgcatctagaggaactattaaaaaaaaggaacagtccaaacccaaggccagcaaaagatgagaaataactaaagtcagagagaactgaataaattgagaccaaaaagtccatacaagagataaataaaaccaagagtttttctttgaaaaaaaataaacaaaattcatagactgttagctagattaacaaagaaaaagagaaaagatccaaataaacacaaatagaactgacaaaacaatgttacgaacaatcccacagaaatagaaaagatcgtcaaagactattatgaacacctctatacaaacaagctagaaaacctagaagaaatggataaattcctggtaacacaaaatttatcatatttcaaccaggaagaaagtgaaaacctgaacagaccaataacaagttcagaaatttaatcagtaataaaaaccctactaactaaaaatagcccaggaccagatggattcacagccaaaatccaacagccatacaaagaagaactgataccgatcttactgaaacttttggaaaaaatcaaggagtgggggcttcttcctaactcattctatgaagccatcatcaccatgataccaacatctgtcagagacataatgaaaaaaagaaaactacaactaaatatccttaatgaacatagacataaaatcctcaacaaaatgctagcaaattgaatctgtcagtgcatcaaaagttaattcacatgatcaagtaagctttatttttgggatgcaaggttggttcaacctacaaagtcaacgaatgtgattcacctcataaacataattaaaaacaaaaactatatgatcatctcaatagatgcagaaaaagctttctgtaaaatccaacatcccttcatgataaaaactgtcaataggcatcaaaggaacatacctcaaaatattaagagccatctatgacaaacccacagccaacatcatattgatgggcaaaagctggaaccataccccttgagaaccgaaacaagaccaggatgaccactcccgccattttaattcaacatggtactggaagtcctagccaaagcaatcaggcaagagaaggaaataaaaggcattaaaattggaaaagaagtagtgatactgtctctctttgctgatgaaataattttatacatagaaaaccctaaagactctgtcagaaggctcctgaaactgataaacaaattcaataaagtttcgggattaaaaaaatgtacacaaattagtaacatttctatgcaccactaacattctagctgagaactaaatcaagaacacaattccatttacactagccacaaagaaaataaaatacctaggaatccatctaaccaagaaggtgaaaattctctacaaggagaactacaaaacacttctgaaagaaataagaaatgatacaaacaaatggaagaatattccatgctcatgaattaggagaacaaatagttaaaatcgccatacttccaaaaacaaattgcagactcaatgctatccatttcaaaatgcaatgtcatttttcacgaaattataaaaatttattctaaaatgtatttggcaccaaaaaaagagcctgaatacacataggaatcctaagcacaaagaacaaagcccaggcatcacattacccaacttcaaactatactacaatgctatagtaacccaaacagcatgatactactacaaaaacagacacatagaccaatgagacagaatagagaacccagaaatgaggctacatacctacaatcatctttgaaaaaattgacaaaaacaagcaatgtggaaagtaccctttcttcaataaatagttctgggataactgactactcatatgcaaaataatagaactggacccctaactctcactatatacaaaaattaacccaagatagtttaaagatttaaatgtaaaacctcaaaatattaaaattctagaagaaaacctaggaaatatccttctcaagatagactttggcaaagaatttatggctaactccccaaaaccaattgtgacaaagacagaaattgggacctaactcaactgaagagcttctgcacagcaaacgaaagtatcaacagagtaaacagataacctacagactgggagaaaatatttgcaaactatgcatctgacaaagttctaatatccagaatctataaggaatgtaaacaaatcaacaagcagaaaaccaaaaaacctcaattaagtatgacatgaacagacacttctcaaaagaagatgtacacatggccaaaaaacatatgaacaaatgcttattatcagtaatcatcagagaaatgcaaattaaaaccacagtgagataccatctcacaacaatcagagaagcagaagcaattactaaaaagttttttgttttttttaataacagatgctgacaagattgtggagaaaagggaacacttatacactcttggtgggaatgttaactagttcagccaatgtgataagcagtttggagacttctcaaataacttaaaatagaactactattcaatcaagcaatcccactactgggtatataccaaaaggaaggtaattaactatgtcaaaaagacacatgcactagtatattcattgctgtgcaattcagaatagcaaagatttgcagtcaacctaagtgctcaccaacagtggattagttaaagaaaatgtgctacatatacacatggaacattacatggccataaaaaataatgaaatcatgtcctttgcagcaacatgaatgtagcaggaggtcaatctcctaagtgaactaacccaggaacagaaaaccaaataccacatgttatcacttataactgagaaccaaacattgaatacacatgaacataaagatggaaacaacagataccgaggactacagatggggggaggagtagggaggtataggctgaagaaacacctgttggattctatgctcattgcctgggtgatggcattgttggaaccacaaacctcagagtcacacaatatgcctatgtaacaaacctgcatgcatacctttaatctacagtaaaggttgaagttatttaaaaataggaagaagaattaccctatacctaaagctaagatttttccctttgaatattcgtttcttcatcactgtagataagcagggaaagaaaaattattatactatactagccttttatgtgaccatgaggatttggggtaggtaggtggacagcttagataattcaccaggatattgatacaggctccatggctggaaataaccaaggatgagtgctgtgttttgagtggtctcccccagaaacgtttgttgaaatcctaacccctggtatgtatgaatgtgaattcatattatataaaaaggaataaatagcctgagcacagtggctcacacctgtaatcccagcactttgggaggccaaagcaggtggatcatttgaggtcaggagttctggccaatatggcaaaacttcatctctacaaaaaaaaaatacaaaaaaaaaaattggctgggtatggtggcgcatgcctgtagtcccagctactcaggaggctgaggcaggaattgctgaaacctggaaggcagaggttgcagtgagccaagatcatgccactgcactccagcctgggtgagacggcaagatattctgtcaaaaataaataaataaaaaacagaagaagaaatacaagaatgacagcaaactttgtattcaaaactatgaaagtaagaaataggtggaccaacatttttaaagtgctacaagaaaatatttcaaactagaatctttcaacctgaaaaggaaaacattttcctgcaataaaggtgccattaaaaatgtctcacaatttattacatgaagcattgttctacaataaatgttaagctcttgaagcaaagattaatgataccatttagtaacttgaaattcaaaaaagtggaagtatcccaagaggcaaatacgtgtgcaattattaaatgtttcatatcaacacccaaccttatgctgtctacataagctgcacttcaaatactaatccacaagatgtaaatattgaaagaatgacattacattgtcatgataatgcccagtgcaaaatatgcttctagtcagttgtatacatagaataggtaaatgtttgtaataaaaagtattcctcaatagaagtttcttaactcaaagaatgaaatatttcaccatgcacatacaaagaagagatatatggagatatgaagaggagtacttcataatgacaaagaggcaaattcataaataagacataataatcctaaatgcctacacacctaaagctggaacctcaaaacacattaaattaaaggcataattcaaaacataatcaatcacatccaaattgcagctagagatagcaacattcacctcacttccagaacaagtacacagaaaattattaagcatatgaaagacttgaaaaacatttgtgtaggcggcgggtgcataaggttgggtgttgatatgaaacatttaataatttcaataatcctagcactttgggaggccaaaatgggaggatcacttgaggccaggagtttgagaccagcctgggcaccatagtgagaccccgtctctattttttttaaataaagaaaaacatttgaatgatttttttcttaactgacatttagaaaacatccacctcaaatcttcctaatccacaaacttgtctagcacccctggaacattcaccaaaataaatttttaaatgctgaatcataggtaatatgatagatgaaacagttgaattaaattataaatgtacaacaaggaaatgctggggaaattatcaaatattttaaaattaataaacacacatagcaataaacaatgagtggaagaaaaacatttcaaagaaaggtggaaaatattttgtatcaattaaaaatgaaaacacatctcggcaaatgactggggatacagatagaacagtgttaaaggaaaataagcctcaaatgtctgtgttagaaaagaaggaagagctgagtaaataggtaactttcgcttgcagaaatactacacatcagcaaattaattccaaagtaacgtcgaggaaaaacataaaatggcaagcaaatatatacgtgcatatgtacgtatattcataaatgacaaacaggacagaaaaatcagtgacatcaattttgttccttagaagaaacaggaaaattgaccccaaaaaactttccaggccacatttggtcatgatggaaatattttggcacttcctggttaagctcaacaccaacttgcacccaaaaccaataatttcattcctaggtaaatatgtctaattaattcagcatatgtatgcaagggatcacacagaaacacgattatcaaggcccgagttataaaagagaaaatccggaaacaacacaaatgtccatgataaaaagagtggataattacatgttgataaagttatgtatggactattaaactgcaatccaaaagaataaaatagaactataaaattcaatatgtatatggtgtcatagaaacacaaatgtgagaaaaagaaagaaaaatacaaaatttatattttttaaaatttgaaacaactatatatgtgagtgcttagggtgtgtgtgtgtgtgtgtgtgtataaccatatgtatataaacgcacacatacgcacacatatagaatgtcccggccaggcatggtggctcacacctgtaatctcagcactttgggaggctgaagtagacagatcacttgaggttaggagttcaagaccagcctggccaacatggagaaacctcctctctactaaaagtacaaaaattaggtgggcgtgatggtgggtgcctgtaaatccagctacttaggaggctgaggcacgagaattgcgtgaacctgggaggtggaggctgcaatgagccgaggtctcaccactgcattccaaactgggtgacgaagtgagattgcgtctcaaaaaaaaaaaaagttctaaaagttgtgacttgggtgtggcagattgtgacatactgccagctgctagaaatgctggggcaggaggattgcttgaactctgaagtcaaagaacagcctggggaaaatagcacatgaagaagagtttgaatctcagataaaaacaacaaaaatacatcaaaagtctttaatgtaagccaagcattcagtcatctcctgtatgagagattggatctgagacgtgttttgagttggttatagtgaaggatgcaaggtgtcaattctagttggaacaatttccaggaagccatgttccgctcttgaccaaacagccactgggcctcatgcaaggtagaaatagcctgcatacgtcatcctcccatgatgtggtcagcatgtaaactgcatgagcccctcacaacatcctgtgtgctgctgaactgagctggggcgcagccgcctgtctgcaccggcagcaccatgtcgctcatggtcgtcagcatggcgtgtgttggtgagtcctggaagggaatcgagggagggagcgctggggtggagatctgggcctggagtggagatctgggcctggagtggagatatgggcctggagtggagatataggcctggagtggagatatgggcctggggtggagatatgggcctggagtggagatatgggcctggaactgtagatatgggcctgaagtagagatatgggcctggagtagagatatgggcctggaactgtagatatgggcctggagtggagatattggcttggagtgcagatatggacctggaattgagatacgggcctggaggtggagatatgggcctagagtggagatatgggcctggaggtggagatatgggcctggaactgtagatatgggcctggagtagagatacgggcctggagtggagatgttggcttggagtgcagatatgggcctggaatggagacacgggcctggaggtggagatacaggcctggaggtggagatatgggcctggagtgtagatatgggcctggagtagagatataggacggaggtggagatataggcctggagtggagatatgggcctggagtagagatataggacggaggtggagatataggcctggagtggagatatgggcctagaggtggagatatgggcctggagtggagatatgggcctggaggtgatgtacagatggatcatccatcatgatctttctttccagggttcttcttgctggaggggccctggccacatgtgggtgagtccttcccccaaaccttaggttgtcatctccccacataagatgatgctcctgaaacgggaggcaggcgacacagggggttgactgatgggctgaccatgggaagccatgtgggaatctctcatgaactaggaaaaggaagccaggggaagcttcgccacagttctgtcctagccctccccggcctttctttcccttggctgagtctgtggggacccagggggagactgaagtgctcaaaggagtggtgtgcagggaggaagtggtgtcaccggcagaggaagggagagaagcagtgcaaggaacaacaggcctctgaggacaagagcataactcacaccctccagcgtttccatgacggtaggggctgcaatgtggctgctgtcattctacctaagaggtgggggaaccacagtcatgaccctgacattccagatcttctaataggggctcagttgtttattatggttcatgcattagctgatcatgccctccatcctgtgtctaccttgtgttcttttatgtaagtaattttgcagtgttaaaatctagtaagagtcgcttcttcagcacctgctcaaagttctcagctgacacttgctgtagggagacgccatgtctatgcgggatgggtccttcctgtagccctgggcacccaggtgtggtaggagccttagaaacgtggaaatgggagaatcttctgagcacagggagggaggggcggctccacatcctcctctctaaggtggtgcctccttctcccccaggtggtcaggacaagcccttcctctctgcctggcccggcactgtggtgtctgaaggacaacatgtgactcttcagtgtcgctctcgtcttgggtttaatgaattcagtctgtccaaagaagacgggatgcctgtccctgagctctacaacagaatattccggaacagctttctcatgggccctgtgaccccagcacatgcagggacctacagatgttgcagttcacacccacactcccccactgggtggtcggcacccagcaaccctgtggtgatcatggtcacaggtcagaggctttctgtctgggcttctcactgtcccacctcctgaatcccagagcttctggtgggggcgtccatcagggtccaatcatccaggccccgactgtatttggggtaaagggggattcagtacagagaaatagttgctgtggtgggaagaataattgtccccagtgatggctacatggtaatccatgaaccctgtgactatttatgttatagggcaggggactgaagaggaagatggagctcaggttgttgatgagttgaccttgcgatggggagacagcctggactgtcctgctgtgctcagagtaatcacaagggtcctcatgagaggaggaggaagaggaaagtggggttagagcaacgtcgtgggagggagactccatcagccacagcgggctttgaagatgggggaaggccatgagccacaaaggcaggtggcctctaagggctggagaagtcaagggaactgattcttccctgagtctccagaggaaacacagccctgcagatgccttgattttagcccagagagaactgggtccgatttctgttctccagaagtggaagaggtcattgtattctctcctgccccatgtttgtgacaattttctccagcagcaacaggaaaccaacacaggaacccaggtgaagcacaggttaagaaaccaaacaaggagaaggttggctacactgattttagcatgggtgggatactgatgctaccaccaggctcgatccacatagggaggggttgatgctcctggaaccagcaccaggggccaccctatggaagctggggccatggagaaggcacagacatgaaaggagaggctcccaatccccatcaggaacagggacactgatgcctgccttactgatgagttcgtacctcctgccggcctttccaatctgtccaaaagagattgattcaggctgctaagagcctggacatgcagcctgtcatggttcctcttccacccccacataaacaccaggaaagagattagtgggaaacagatacaacagcctaagaggtgacactgagcacagtgggaagggaatcagggctactagagacagagagacagggaagagggagggagacagatggagggacctgcaacaggggttatgggcacaaaagaacacggagacacagacaggaaggagagagatagacaccatggaggggaagcctcacttatttcaggtcccatgaatgggatgagaaagggagacgccttctgaactcacaacctctcttcttaggagtccacagaaaaccttccctcctggcccacccaggtcccctggtgaaatcaggagagacggtcatcctgcaatgttggtcagatgtcaggtttgagcgcttccttctgcacagagaggggatcactgaggaccccttgcgcctcgttggacagctccacgatgcgggttcccaggtcaactattccatgggtcccatgacacctgcccttgcagggacctacagatgctttggttctgtcactcacttaccctatgagttgtcggctcccagtgaccctctggacatcgtggtcgtaggtgagagaatacagacctgcctctcacccttgctgggagatggagtgaatgatctaggactggaagccccaggtggtcatgaggaagatgagtgtggggttcctatggagagaaagtgacttggtgaggtctgtaccaacaaaggcagagaaacaggagacacaagtacagacctcatgtcataacatagaagccagacacaggggccatacaaggtgttagaaaaagagataaagaggtaaagaagacacagagagacagacatatcccagagagaggtgtccttctatgctgactttgttcagagaccaggcacaggttagaaggttccattctgttttacctctacaaagtgttctctcccaggagaacccaaagagacacatctatctggcctgagttgggccatgtggccccaggctggtggcacctacagatgttgtgtttattcttaaacctctgccttccgtgcagtggagctgtcatcgtcccaggacaccatggccccaggtgagggagcagaacaccaacccctgtatgctgtgagttcctggagtccccatactggattctgaggctcatattcaaatagcaccacatgttataggattactgagaacaaaagcccacagagagacacggagtgaaatcagggaaatcaaaaagcaaagacatgaacacacacacagaatgagccagaagaagggaattgagagactcacagacacataaagagatagaaaaagagggcagagaagtggagcgtatgatggaaggaagcagagaaaagccctaaaatcagagccctgagggaggggcacaaagacagggaaagataaagatgtgaggatggattgcagagactccaaaagggaactagagagactgagaggcagagaaagacaaggagatggagagagacagatgatagatggacagatagatatagatagatgaaagataaaaggtagatgatagataatagagagacaggtgatagacaaatagatgatgaatgactgatagatgatatagatagacaagtagaaagacagacagatgatatataaatagatatagagagatagaaagacagataaacacatgatgatagatggatagatgcatacatacatacattgattgatagatgatagataacagagagataggtcatagatacacagatgatgatagatgatagatacatacatagataaatgatagatcgatcaatagataatagatagaaatatgcagaaagttatgagcaagacagaaagtgagagactcagaattaaagaaagaggaagatcaagtcaaccagtccaaggagggtcagagagaataaaatggtacaaaaaaagaaaacatagctagggatggagaagtgaggtcagagacctagagagacagagaaggtggaaggaggaaatagacatgaagagagatgggggtggagggtgagagagagaaagagagcattaagtcatagagcaggggagtgagttctcagctcaggtgtgaggagagctgtgacaaggaagaacctccctgaggaaaccacctcttcttcttccaggtctatatgggaaaccttctctctcagcccagccgggccccacggttcaggcaggagagaatgtgaccttgtcctgcagctcccggagcttgtttgacatttaccatctatccagggaggcggaggccggtgaacttaggctcactgcagtgctgagggtcaatggaacattccaggccaacttccctctgggccctgtgacccacggagggaactacagatgcttcggctctttccgtgccctgccccatgcgtggtcagacccgagtgacccactgcccgtttctgtcacaggtgagaaaacaccatgcctgtcccatgtcttgtgatcctagagccatagctgaggagcttcctgctgatgatggagagaagcatggacagatgccgagacagaacacacagcatgggtgtaagggcggggtcagggcgcaggatggcagacagggcacctccaaaccctcctgtatggcctgcaaggatgcccttgatcagggttccaggcacccaggcagatggagaaagaggtcagaacagacccagaggagggagactgggctctgcctggggagatcagaggttctctcagcccctcaaccttacccacttcccagaagcccatcctggcctgtcacccacagagagatgtcatcaccagcaacgcctacacccttttctttttgtttgaagaaatatttattgaggtgaaatatacctatgtaatttaccacctttaccatttttaagtgtgaagtctactgttcataaatacatttataggctgggcacggtggctcacggttgtaatcccaacactttgagaggccaaggcaggtggatcatttgagatcaggggctcaagaccaccctggccaacatggggaaaatccatctgtactaaaaatacaaaataataattataatgataataattagccgagcatggtggcacatgcctgtagtcccagctacttggtagggttgggcaggagttgcacttaattgcaggaggcggaggttgcagtgagctgagatcatgccactgcactgcagcctgggcaacagagagagacactctctcaaaattaattaattaattaattagtattcttttttttttaccctccacccttcccttcctggcctctggtagccaccattctactctctacctttgtgagatccaccttttagctcctgcatatgagtgagaaatggaaatacttgtaatgacctccagttccattcatgtggctgtaaatgacaggatgttactctttctatggatgagttgtccctattgtgtgtgtgtaccacattctctccatccattcacccactgatgggcaggtaggttgatccacatcttggctactgtgaacactgctggaacagtcatgggagtgcagatgtcacttcgatacgctgatgtcctttcctttgggtttacacccagtcatggaattgctagatcctctggaagtgtctttttacattttgttttatggtttttgtttttgtttttgttttttttagactgtttcactcttgttgcccaggctggagtgcagtggcgccatctgggctcactgcaacctccacctccaggattcaagagattccccagcctcagcctcccaagtagctgggttactggctcccaccaccacactcggctaatttttatatttttagtagagacagagtttcgctatattggccaggctgctcttcaactcctgacctcaagtgacctacccacctcggcctcccaatgtgctgggattacaggcatgaaccactgtgcccgacctcattttattttttgaggaacttccatactcttctcctctgtaatggctgtactaatttacattcgtatcagcagtgtaccagatgcaaccctggttgactcagcagagcaagagacgtgcagtaagagagaatttagcttatttatgcacacgacacttccactcactcactcgttcagccaatgccccatgctcaggctgtgcagtgtggaatcttttcctattgttgccataacaaatttccacaagcttcgtggatgaaaacatgtttttcttaattatctcacagtgctgtaactcagaagtatgaactgcatttcactgggctgatatcaaagggacagtaaggctggatttctttttaaggttccaagcaagaatctgctccttaacgtttcccagctcctagaggctcccacgttcctgggcccctggtccccttcctccttcctccttcctcaaagcccacaaaggctggtcacgtctcacatggcatcattcagactcttcttctttacccacacctttttctctgaatcctgctctgccttcttcctcatcttttaaggactttgggattctattggggtcaccaagataatccatctcaatctccctaaaatcatccagcgtaccctctttttaagttcagctgattagcaaccgtaatgccatctgcaatcttcattcctcctttcctgtaaaataacatattcacaagctatggaggctaagacagggacattttgggggtggggcagcattctcctgccttccacaaatggtaaacaggatgcatttggcctctgctcttgggacgctgatattgcagatgggtaaatgcgagggcagagaatgaatgcacaagggtaccaataaatgaatgatccattgggaagcatctgtgcaccaaatctggggttttttgtgtgtgtgtgtgttttttgttttctttttttttttgagtagagtctctctctgttccacaggctggagtgcagtagcacaatctcagctcattgcaacctctgcctcctgggttcatgcaattctcctgcctcagcctaccgagtagctgggattacagctgtgcgccaccacactcggctaatttttttggtatatttttttagtagaaatgaggtttcaccatgttgtgcaggctgtctcaaactcccaatctcaagtgatcccaccgccttagcgtccctaagtgcaaagattacaggcgagagctactgcgcccagccaggatttaaaataagtaatagataatgctgagtatataatttcaggtgacagagaaggtctcactgatcagataatatttgtgaccttaatggaaaaaatggattcaacccttggaagattggcggaaggattttccacactgagctctcagccgtgaaggcacaaaggtggaaacattcttagttcaaggaagaggctctgcctcaaatgctgggaatgagatggggagaatgacaagacaactgtagagagatggagagcacactgggtacacaggaaactaaggaggaacaaggagcatgtttttgatactcacagcccttggattcaactcagagctaactaggaatccctacctgattaacagtgaccgacatgaaaataagggaggcccaggtgcgtaactggaatctaggagaccgtggaaaaggcaattcccgccccactggtgaaacgtagggttgatttacacactaaatgaatgaaagatggatataagctatgcttgtgaggtagaatcatttgcagggagggcttgctgggtttgatttttcctagtagtttaatccttgtttcattaatttctttctgagatgtgttttttttctacatctaaatcaatacctggcagaggagcgatagacacatgaggggtggtgcaaatgaagggacctagtataatataatatacaagactgtggatgggggctcacacctgtaacccaacactttgggaggccaaggcgggtagatcacttaagggtaggagtttgagaccagcctggccaacatggtgaaaccccgtctgtactaaaaatacaaaaattagcctggtgcattggcacctgcctgtaatcccagcgactggggaggctgaagcagaagaatggcttcaaccctggaggcagaggttgaactgagatcgcatcactgcactccagcctgacacagggggactctgtctcaaaaaataaaaataaaacatacataattatgacacacagaaattacaaaggcaactggataccaaccatcatttttctatttctctgtgtttaattctttgaccctttatcttatccattaaacaatcaggttaaacctcttccttatttggctttctgtgagcttgggatcatatggaaaatgtgaaagcctcctgaacccaccagcacaggtcctggaatagagaacgtgctctgttcatggcataaaacttgccccttcacccaaatcccccaattcatctctacttccaatcacctatggagatacagatagatcatggggaggtaaacactaatactctttggagtgagctcagatcttggactcagagaccagtgccagcactagcccctggtcacatttcgtactaactcacagaaggacaggctgtattgaaacaataaacgacggagagggcggtccttccccgtgcttctcgggtggaatagcagcctaatatatgtctcagcagatcacaaaaagtagcatgttgttcctgggctacatcattatttcatggctgtttgatttaagtcagttctacttcactttttttatcttgatttcattttttctttcttttcttggagaatgtaatttttttgagtcaagagggttgtggtggtagaaactgtaaagcacattcgctgtgtatcaatcccaatccagtcttcccagagaagattctaaacacctcctggaatgcacctgggcctataccaattcctatcactcaccgtcactccagggagacagaacacacagagaacacattacacaggcaggttcattactaacagataagcagcgagtgacaacagaaacctacatttcaatgtgagccagtccctcaaggctcagaaaagctgctcgagacatgtggagtcaccccatatgcagtgtatctgggggaaatcaaaaagcagcccagcctgggttttgtaccctggagccacaggaagcactcagctaaagcactgcatgacgtcctcctccaggaagaacaggaagacagcccaggctgttctgggatgttcctcctgatctcaggacgttgctgtcttagtccatttttgttgctctaaaggaacacttgagcctgggtaacttctaaagacaagaaatgtgtttgcctcacagttctgcaggctgtactggaagcatggcaccagcatctatttcttgtgacggcctcaggctgctcccactctggcagaagggaaggagggtctgtctgtgcagagaccacagagatcacacggcaagagagggaccaagggggagggggagcgatggagcttccaagctcttttaacaaccagttctccaggaactaatagagggggaacttgctaaccccgtctccttggaacagcattgatctgttcatgatggatccacctccatgacccaaacaactcccaagaggcccaacctcccactctgggggttacatttcaatgtgaggtttgaaggggtcaaacatctaaactaaagcagttgtatcctcagcacgttctatggttactacaactgagaaagcaggaggaagctaggtctcccgccatctgggtgcttgtcctaaagagacgttgtatgtggttacctgtcaatcaagaaatgtgagacaattcatatagaggaactgctatgattagcttcttattggtgtcttgtcttcctccaggtaactccagaaacctgcacgttctgattgggacctcagtggtcatcatcccctttgctatcctcctcttctttctccttcatcgctggtgtgccaacaaaaagagtaagtctcacgaagcagaagccagagagctcagggccatgtggggaagcaggatgggagcactcaggtgtgtgttcctcacagactggatggtccctggcccaaggcaggagccacagaggcaggactttctagagagagcaccagactccctgcctctgccttcagctcacagaccattgcctgattctgaaccgtatcctcacatcccctgcagccactcacatccaggagaaggttccatgacaggcagaaagtgggacacagaatcaataggatgggaactcagagctatacatgggatggatccttgagctcagagagatagaatgtctgagtctgctgttggcaactgagggacctcaggcacctatggcctccccctgtatgttggtatctgcttatgaaatgaggacccagaagtgccctccgagctgttttgacgacttccgtcttctacagatgctgttgtaatggaccaagagcctgcagggaacagaacagtgaacagggaggtaggtgctcctccgcccagcctcgtggctagtcttattcccaaagagtcctggaaaatgtgagcaccctccctcactcagcatttccctccctccaggactctgatgaacaagaccctcaggaggtgacatacgcacagttgaatcactgcgttttcacacagagaaaaatcactcgcccttctcagaggcccaagacacccccaacagataccagcgtgtaacacggaacttccaaatgctgagcgcagatccaaagttgtcttctgtccactagcaccacagtcaggccttgatgggatcttctagggagacaatagccctgtctcaaaaccgggttgccagctcccatgtaccagcagctggactctgaaggcgtgagtctgcatcttagggcatcgctcttcctcacaccacgaatctgaacatgcctctctcttgcttacaaatgtctaaggtccccactgcctgctggagagaaaacacacttgcttagcccacaattctccatttcacttgacccctgcccacctctccaacctaactggcttacttcctagtctacttgaggctgcgatcacactgaggaactcacaattccaaacatataagaggctccctcttaacacggcacttagatacgtgctattccacctttcctcagagtatctttcagccttctgtcagcagtaaaacttataaattttttttataatttcaatgtagttttctattcttcaagtaaacatgtctgccctcatggtttcttcaatgggactcttttcttgcctaaggcttccggtgttatcattaccacgtccacataaccccatctgttctccgctgggttctcagccctggactctgagcttctggaagcatggtggagcctgaattgtctctgagactccaatttccatccaaagatgcagcacataggaggttccaaggatggtgaatcagatgaacaagtgatattcttactctctgcagatctggaaagctggcagagtcattccacgatgaaacatttgtagagtcataggccttgttagtctcatctccacagggacacgtatcaacacatcatctttcatactactataaatagacagtcactcctccatatctctggggtttacacatgtttattgaatcagcaataaatcaaaaatattttgagaaaaaaaatccccgaagtttcaaaaagcaaaaaactatgttgaatcgacacaaattgagtggcgtgtaggctgtgtcaggaattataagtaatcaagagatgatttcatgtatacaggaggatgtgcatgggttctatgcaattgctatgctattttttttttttttttgagacagtctcactctctcacccaggctggagtgcagtggcgtgatctcaactcactgcaacctccgccttccaggttcaagcgattctcttccctcagcctccccagtagcctcccctaggattacaggcacgtgccaccatgcacagataaatttttttgtgtgtatatttttagtagagatggggtttcagaa[136 bp omitted]gattttggtatctgaatggggatcctggaaccaatcacccaggtatagtgaaggaccatggtatataatttttatttgtcaatcttaaaaataaagcataaaaaatttacaacaacaagataaaaaataagaagtgtttttatagtgtgaggataagtttagatttattttttcctacgtgtaaccctatggtcctgtgttatttgttgagaaaatattctattccaccttaaactacatggcagcctttgtcaactataaagggactgtgtatccacagatgtattttagacacagttttctgtccagtggttctctgtatcccctctcatgaggatgctgcattttatataaacttatagaaccccttaaaatttggtaacctgagtcctctgatttgttattataggttatttagtttgctttttttttttttcttgagacagactcttcctctgtcacccaagctggagttcagtggcttgagctcagctcactgcaacctccgtctcccaggttcaagctattctgatgcctctggtttagtagtagaaactcaagcaggaaaattagaatggcttcttgtcacaattactctgataatgttaataatacctgttagacattttgcacattacatatgaagaagagtttgaatctcagataaaaacaaaaatacatcaaaaatctttaatgtaagcacagaattcaatcatctcgtgtatgagaggttggatctgagacgtcttttgagtctggtcgtagtgaaggacgcaaggtgtcaattctagtgagaacaatttccaggaagccatgttccgctcttgagcgagcacccactgggcctcatgcaaggtagaaagagcctgcgtacgtcaccctcccatgatgtggtcaacatgtaaactgcatgggcagggcgccaaataacatcctgtgcgctgctgagctgagctggggcgcggccgcctgtctgcacagacagcaccatgtcgctcatggtcgtcagcatggtgtgtgttggtgagtcctggaagggcatcgagggagggagtgcggggatggagatcggggcccagagttggagatataggcctggaagtggagttatgggcctagagatggagtgatgggcctagaagtggagatctgggcctggagtggagatctgggcctggagtggagatatgggcctggaggttgagatatgggcctgcagtagagatatgggcttgtagtggagacatgggcctggagatggagatatgggcctggagatggagatatgggcctgcagtagagataggggcctggagtggagatatgggcctggagtggagatatgggcctggagtggagatatgggcctggaggtggagatatgggcctggaggtggagatatgggcctggagtggagatatgggtctggaggtggagatacgggcctgcagtagagatatgggcctggagtggagatatgggccaggagtggagttatgggcctagaggtggatatctgggcctggagtggagatatgggcctaggaaggagatatgggcctgggtgtggagatatgggactggagaggtgatatgggcctggagtggagatatgggcttagggtggagatctgggcctggggcggagatatgggactggattggagataggggcctagggtggagatctgagcctggattggcgatatgggcctagggtggaaatatcagcctggagtggagatatgggcttggggtggggatatgggcctggaaactgggtctctgcacagccgacagccctgttcttgggtgcaggtaggcactgagggtgagtttaacttcagcccaggaagggcctggctgccaagactcacagcccagtgggggcagcaagggaggcctggtttgcctgcagatggatggtccatcatgatctttctttccagggttcttcttgctgcagggggcctggccacatgagggtgagtccttctccaaaccttcgggtgtcatctccccacataagaggattttcctgaaacaggagggaagtcctgtcggggagtctctcataaactaggaagagaggaccctggggtgctcagcccacatttctgacctcgcctccctggcctctcaaccccttggcagagtcaagttctgtggggaccagggttagactggggtgctcaaagctggggtgtgtggttgggaagtggtaggaacagcagatcctctgaggacaaaggtgttactcacacacttcagcgtttccatgatggtaggggctgcagtgtggctgctgtcattctaccagaagaggtgggaaaccacagccatggccctgacattccaaatcctctgatgggggctcagttgtttattttcgttcaggcatccgctgatatccattcacaaaggacatgccctccacctcatgtctaccctgtgttgttttatgtgagtaatcttacagtattaaaatctagtaggagtctctttactcagcacttgctcaaagttctcagctgaggcttttgttgtagggagacaccatgtctttgcgggatgggtccttccttcagccctgggcaccaaggtgtgatagtagccatagaaacgtggaaagcgaggagaatcttctgagcacagggagggaagggcagttccacatcctcctctctaaggcggcgcctccttctccccaaggtggtcaggacaagcccttgctgtctgcctggcccagccttgtggtgcctctaggacatgtcattcttcggtgtcactcttatcttgggtttaacaacttcagtctgtaaaaggaaggtggggtgcctgtccctgagctctacaacagaatattctggaacagccttttcatgggccctgtgacccccgcacacacagggacatacagatgtcggggttcacacacacactcccccagtgggtggtcagcacccagcaaccccctggtgatcgtggtcataggtcagagggctcctgtcttggattctccttgtcccacctcctgaatcccagagcttctgttgggcatgtccttgagggtcccatcacgcaggccctgactgtatttgtggtaaagggggattgaatacagggaaatgggtgctgtggtgggaagaataattgtccccagtgatgactacattctaatccctggagtctgtgactatttatgttataggggaagggactgaaggggaagatggagctcatggggagacagcctggactgtcccactgggctcagtgtaatcacaagggtgcacatgaaaggaggaggaagaggggagtggggattagagcagtccagtggaagtcttcaccagctttgaaggtggaggaaggccaagatccatgaatgcaggtggcctatagaggctggaaaagtcaaggaactgattctccagagtctccagagggaacaaagccctgcagatgccttgattttagcccaggaaaaatagggtccaatttctgtctccagtactggaaggtgtcagtgtggtctctcctgctgccatgcttctgataattttctacagcagcaacaggaaaccaacactggaacccaggtcaaggacaagttaagaaacaacccaaggaaagccaggcatggtggcaggtgcatgtaatcctagcgactcaggaggctgagggcaggagaatcacttgaacccaggagacagaggttgcagtgagcctagaccacaccacttcactccagcctgggtgaaggagtgagactctgtctccataattaattaattaattaaagaaaccaaacaaggagaaggttggctaccctgagatcagcaagggtgggatgatgatgccaccaccaggctccatccacatagggaggggttgatactcctccaaccagcaccaggagccagcctatggaagctggcaccatggagaaggcacaggcatggcaagagtggctcccagtccccaccaggaacagggtgtgtggacactggtgcctgccttattcatcagttcataccttctgccaaggattgcaattcatccaaaagagattgaaccaggctgataagagcctggatgtgcagcctatcctggttcctctttcacccccacataaacagcaggaaatacattagtgtgaaatagatacaacaccccaagagatgaggctcagcccagtgggaagggaatcagaggctactagagacagagggacagagaagagggagggagacagatggaaggacctgcaccaggagttaagggcacagaaaagaacatgaagacacagagaggaaggagagagacagacaccagcaaggggaagcctcactcattctaggtgccatggatgggatgataaagagagacaccttctaaactcacaacctctcttcctaggagtccacagaaaaccttccctcctggcccacccaggtcccctggtgaaatcagaagagacagtcatcctgcaatgttggtcagatgtcaggtttcagcacttccttctgcacagagaagggaagtttaaggacactttgcacctcattggagagcaccatgatggggtctccaaggccaacttctccatcggtcccatgatgcaagaccttgcagggacctacagatgctacggttctgttactcactccccctatcagttgtcagctcccagtgaccctctggacatcgtcatcacaggtgagagtgtccggacattctcattgtcattgggatgcagagtgaatgatccacgacttggaacccccaggtagttgtaaggaagatgagcttggtattcttatggagagagactgacttgctgaggtttgtaccaacagagacagagaaacaggagacacaagtacagaccaggtgtcataacagaggacagacacaggggccatacagggagttagaaaagacagaaagagttaaaagagacagacagacagacatgtcccagagagaggtgtccctccatgctgactttgctcacagacctggcacaggttagaagtttcatttctgttttacctccacaaagtgttctctaccaggagaacccaaggacacccatatttatgacctgagttgggccctgtggcctcaggccttgtggcacctacaggccatgtttattctgacacctctgccttccatgtaatggagagtaatcgtcccaggatatcatggccccagaacaccaacccctgtatgctgtgtgaacttgtggtctccagactggattctgtggctcacattccaaataaccccacatatgaaaggatcactgagaggcacagagaaaaatcaggaacaccaaaaagcaaagacataaacacacagagaatgagccagaggaaggagattgagagactcacagacacataaagagagagaaaagagggcagaggagtggtgagaatgatggcagggagcagagaaaagcactaaaattagagtcctgagagagaggcacaaggacatagaaacatggagatgtggggatgaattgcagagattccaaagagaactagagagaccgagaggcagagcaagacagatgatagatggatagatatagatagatgataaataggtagatgatagataataggttaaagatacatagatgatgattgattgattcattaatagataatacatagagatgatgatgatgaagacagataatacgtacagatagagaggcagacagaaatcatagagagagagatgatacatacatataaataacagatgattgatggatagatagacaagtgatagatacatagatgatatatagatatagatgacaggtagagaatttgtagataggcaccgaatagataaatagatagatcgacagataatagatagaaatatgcagaaagttatgaacaggacacaacgtgagaaacttagaatttaaaaaagtaacatcaagtcaaccaatccaaggagagtcagagagaataaaagaatccaaaaagggaaaacatatctagaggtggggaagcgaggtcagagacctagagagacagagaaggtggaagaaggaaatagacatgaagagagatggggtggagggtgagagagagagagagagagagcattaggtcatagagcaggggagtgagttctcagctcaggtgaagggagctgtgacaaggaagatcctccgtaaggaaaatgcctcttctcctccaggtctatatgagaaaccttctctctcagcccagccgggccccacggttctggcaggagagagcgtgaccttgtcctgcagctcccggagctcctatgacatgtaccatctatccagggagggggaggcccatgaacgtaggttctctgcagggcccaaggtcaacggaacattccaggccgactttcctctgggccctgccacccacggaggaacctacagatgcttcggctctttccgtgactctccatacgagtggtcaaactcgagtgacccactgcttgtttctgtcacaggtgaggaaaccccatatctgtctcatgtcctatgatcctagagccttagctgaggagcttcctgctgatgatggagagaagcatggacagatgcagagagaagacgaagcttgggtgtgagggagggatcagggcacaggatggcagacagggcacctccaaaccctcctacacggcctgcatgaaggcccgcggccagggctccaggcacacaggcagatggagaaaacggtcaggagagacccagaggagagagactgggctcagtttgggaagatcagaggttccctcagcccctcaacattacccatttcccagaagcccatcctggcctctcacccacacagggatgtcatcaccagcaacccctacaccctttacttttgtttgaagaaatatttattgaggataaatatacctatatagcttaccacctttaacattttttttttttttgaggcagagtctagctctgtcccctatgctggagtgcagtggcacaatctcagctcactgcaacttccgcctcctgggttcaagtgattctcctgcttcagccacctgagtagctggtgctacaggcgcgcaccaccacgccaggctactttttgtatttttagtagagagggggtttcaccatgttggtcgagctggtctccaactcctgaccacgtgatccacccgcatctgcctcccaaagtgctgggattacaggcatgagccaccacgcccagccacatttaccatttttaagtgtaaagtctagtggtcataaatacatttatatatatatatatatatatatatatacacacacacacacatatataaacatatatatatatatatatatatatatatatatatttttttttttttttttttttttaccctccacccttttattcctggcctctggaagccaccattctactctctaccttcatgagatccaccttttagctctgtatatgggtgagaaatgggaatctttgtaatgacttccagttccatccatgtggctgcaaatatcaggatgttattctttctatggatgagtagtctccactgtgcgtatgtactacattctctctatccattcatccactgatgggcaggtaggttgactccacatcttggctactgtgaacagtgctgcaccaatcatacgagtgcagatatcacttcgatatattgatttactttcctttggatataaacccagtagtgaaattgctggatactatgaaagttctctttttagttattcgtttgttgttttgtttttgtttttgagacagtttccctctgtgcccaggctggagtacaagtgaagtcatcttggctcattgcaacctccgcctcctgggttcaaatgattttcctgcctcagcctccctagtagctgggattacaggtgcacgccaccatgcctggctactttttgttttttttagtatagatggggtttccccatgttggctgggctgctctcaaactcatgacctcaactgaggtgcccgcctcggtctcccaaagtgccgggattacaggcatgatccacctcacccaacctctttttagttctttaaaggacttccacacttttctccgtaaaggctgtactaatttacactcctaccaacagggtattagggttctcctttctctaccactttggcaggatttcctttgcctgtcttgcagctaaaagccattttattttatttcattttattttgagatggagtttcgctcttgtcacccaggctggagtgcagtggtgcgatctcggctcaccacaacctccacctcccaggttcaagcgattctcctgcctcagcctcccgagtagctggaattacaggcacacgccaccacgcccaactaaattttgtatttttagtagagacagtgtttcttcatgtgggtcagactggtctcaaactcccgaccttatgaggttcacccacctcaggctctcaaaggtctaggatgacagacgtgagccaccacgcccggcctaaaatccattttaatggggtgagatgaaaactcactttgattttaatttgtgtttctctgatgatgagtgaaactgagcactttttagtatgtggggaaatttcatgtgttttgctcctttttcaattaaatcgtttgttttattgagttgtttgagcttcttatatttctagttattaatcccatctcagatgcatagtttgcacatatttgctcccaatctgtgggttgtctcttcactttgttggtttatttttagcggtgcagaagttgcttagtttgaggtaatcccaatggtctatttttgcttcgattacttgtgttttgaaggtttaaaacaaaatgtcttccttcagacaaatgtcctggagcatttccccaatattttcttctacgtgtttcataggttcaggccttagactcacatctttaatccattttcatttgagttttgtgtatagtgacaggtagaggtgcagtttcattcctctgcatgtagatgtccaggtttccctgcactgtttattgaaaagactgtcctttcctgattgtgagttcttggcacctttgtcaaagtccattggatgggctgggcatggtggctgacacctgcaatttcagcactttgggagcccaaggcgggtggatcacctgaggccaggagttcaagattagtctggccgacgtgatgaaacattgtctccactaaaaatataaaaattagctgagcatggtggtcagcacctgtaataccactactcaggagtttgaggccagagaattgattgaacccaggaggctgtggtggcagtgaaccgagattgcacctctgcactccagcctgggtgacagagcgagactccatctcaaaagaaaaaagaaaaaaacattggaggtaaatgcatggattatatctgtgttcttcattctgctccattgttctacgtgcctttctttatgccaatgtgatgctgttttgcttactacagctctgtaacatattttgagatcaggtagtgtgatgctcctgttttctctttataccttgaagtctcaagacagtgggcgtcacatacaaaaattacggaaaaaaggatcccaggactcccagggcccaatattagataacagagtgttggccatgaaccaacctcaaagatttccattgagtagaggacagacaccctcatttcctcacctctctcctgtctcgtgttctaggaaacccttcaaatagttggccttcacccactgaaccaagctccgaaaccggtgagtacagaaccctcttatatccgcttttggaaacctggggaggtagaaaccttcgatgcaggcattgactcagcatctcgcagctctgacattgtacgcctgtcttctaccatctccgaactccagatactccaacagcgaaagggatctgggcccaacctagggctcagtgaaatctcttaatctctcattttatggagctgagacctcctacaagctagaagaatgattgccaatctgacatccttctcaggaaaaatgcaatgtttgttctgcctgcattcctaactggaggataaattcctgggggcttgagagagggaagggaagggaacatctgatgagggcgaggtgttttagagaagttccacttgccaaggaatgaattactgttggtcatgaagcaaccctggctgactcagcagagcaacagccttgccgtaacagagaacggagctcatgcacgcacacttcgactcactgactcattcagccacggccccatgctcaggctgtgcagtgcggaaccttttcctattgttgccataacaaatttccacaagattcgtgggtgaaaacaaaacggttttttaattatcttacagtgctgtagctcaaagtaggaagtgcatcttactgggctaaaatcaaggtgacagcaaggctgccttccctctgaggattccaggcaagaatctgcttctcacttatcccagcttctaaaggctcccagttccttggctcctgttccccttcctccttcctcaaagcccacaaagactggtcacatctcacatggcatcactcagtgccttcttccttaccacacctctttctctgaatgctgctctcccttcttccttatcttttgaaaacttggggattctattgggttcaccaagatgaaaatccctcataatctcctggaaatcatccaggatacccttgttttaagttcagctgattagcaaccgcaattccatctacaatcttcattcctcctttccatgtaaaataacatattcacaagctatggaggctaggacagggacattttggggtgggacagcattctcctgccttccacaaacggtgaacaagatgcatttggcttctgcccttgggacactgatattgcagatggttaaatgggagggcagaaaatgaatgcacaagtggatctataaatgaatgatccattgggaagcatctgtgcatgaaatctattttttgtttgttcttttgtttattgagacagagtcgccctctgtcttccaggctacagtgcagtgtcacgatcttggctcactgcaacctgcgtctcctggattcaagtgattctcctgcctccgcctctcgagtagctgggattacaggcaactgccaccgtgcccggctaattctttttgtatattttttgtagagaggatgtttcaccacgttggccaagcttgtctgaaactcccaacctcaagtgatccgaccgtctcagcatgccaaagtaatgggactacaggcgtgagccactgtgcccagccagaattcaaaatcaataatagataatgctgagtgtatgatttcaggtgacaaagaaggtctcactattcagatatttgtgacattaatgaaaaacacggattgaacccctgaaagattggcggaaggattttgcacacacagctgtcagccgtgaaggcacaaaggtgaaaacaatctgatgtggaaggaagaggctctgcctcaaatgctgggaatgatgtggggagaatgacaagacgactgtagagagacggagagcacactgggtacacaggaaactaaggagcaacaaggagtgtgtgtttgacactcacagccattggattcacctcggggtaaccaggaatccctacatgattaatatgactgacatgaaaataagggaggctcagttgcataactggaatctaggagaccgtggaaaaggcaattgccaccccactggtgaaatgtggtgctgatttagacactaaatgaatgaagtagatggatataagatatgtttgtgaggtagaatcattgactggaaacgcttactgggtttgattttcctacttgtttaatcctcgcttaattaatttctttctgagatttattcatcctacacataaatcaatacctggcaaaggagtgacagatatatgagtggtggtggaaatgaagagacttattatagcataatatacaagtctgtgaacagtggctcacgcctgtaacctagcactgcaggaggccaaggtgggtggattccatgaagtcaggagttccagaccagcctggccaacgtggtgaaaccctatctctactaaaaatacaaaaattagccgagcacgatggtgcatccctgtaatcccagctcctattctggaggatgaagcaggagaatgacttcaacccagtaggtggaggttgcagtgagtggagattgcatcactgcactccagcctgggggacacaaggagactctatctcaaaaaataaaaataagaaatacataaatataataaaacacacacgaatgacaaaggcacctgaattccaatcatcgtttttctatttctctataattacttctttgatcctttatcttatccattaggcaatgagcttaaaacctcttccctatttggctttctgtgagaatgagatcacatagaaaatgtgaaagccctcagaatcctccagcacagatcgtggaatagagaaagtgctctgttcatcgcaacaaaaaacttgcccactcacccaaatcccccacctcacccctacttccaatcacctgtggagattcagataggctatggggaggtaaacattgatactccttggagtgagtccagatcttggaatcagagatcagtgccagcactagctcctgctcccctttcctactaattcacaggaggacaggtggtattgaagcaatagatggccgagggggtggtccttcccccagcctctcgggtagaacagcagcctaacatgtgtctcccgagatcacaaagagtagcacgtttcacacgggcttcaacactatttcctggccatttgacataagagaattctacttagctttttttatcttgatttcacttttgtttccttttcttggagaatgcaagttgtttgattcaagaatgctgtggatgtagaaatcctaaagcacattcgctgtgtatcaatcccagtgcagtcttcccagagaagactctaaatacctcctggactgcacctgggcttatgccaattcctatcactcaccgtcactccagggagacagaacacacagagaatacattacacaggcaggttcattactaacagataagcagcgagtgacaacagaaacctacatttcaatgtgagccagtccctcaaggctcagaaaagctactcgggacatatggagtcaccccatttgcagtgtagctgggggaagccagagagcagcccagcctgggttttgtactgtggagccacaggaagcactcagctaaagcactgcatgacgtcctcctccaggaagaacaggaagacagcccaggctgttctgagacgttcctcctgatctcaggacgttgctgtcttagtccatttttgttgctctaaaggaacacttgagcctgggtaacttctagagaaaagagattggtttgcctcacagttctgcaggctgtactggaagcgtggcaccagcatctatttctcgtgacggcctcaggctgctcccactctggcagaagggaaggagggtctgtctgtgcagagaccacagagatcacacggcaagagagggagcaagggggagggggagcgatggagcttccaagctcttttgaacaaccagctctccaggaactaatagaaggggaacttgctaaccccgtctccttgggacagcattggtctgttcatgatggatccacctccatgacccaaacacctctcaagaggcccaacctcccacagtgggggtgaaatttcaatgtgaggtttgaaggggtcaaacatctcaactaaagtagttgtatcctcaacacgttctatggttactatgagagctataactgagaaagcaggagaaagctgggtctccctccatctgggtgcttgtcctaaaggggtgttgtatgtggttacctgtcaatcaagaaatgtgagacaattcataaagaggaactgctatgattagcttcttattggtgtctcctcttcttccaggtaaccccagacacctgcatgttctgattgggacctcagtggtcatcatcctcttcatcctcctcctcttctttctccttcatcgctggtgctgcaacaaaaaaagtaagtctcacgaagcagaggccagagagctcagggccatgtggggaagcaggatgggagcactcaggtgtgtgttcctcacagacaggatggtccctggcccaaggcagcagccacagagggaggactttctagagagagcaccagactccctgtccctgccttcagctcacagaccattgcctgattctgaactgtatcctcatgtcccctgcagccactcacatccaggagaaggttccatgacaggcagaaagtgggagacagaatcaatgggatgggaactcagagctattcatgggatgggtccttgagctcagagagatagaatgtctgagtctgctgttggcaactgagggacctcaggctcctatggtctccccctgtatgttggtatctgcttatgaaatgagggcccagaagtgccctctgagctgttttgttgacttccgtcttctacagatgctgttgtaatggaccaagagcctgcagggaacagaacagtgaacagggaggtaggtgctcctcggcccagcctcgtggctagtgttattcccaaagagtcctggaaaatgtgagcaccctccctcactcagcatttccctctctccaggactctgatgaacaagaccctcaggaggtgacatatgcacagttgaatcactgcgttttcacacagagaaaaatcactcgcccttctcagaggcccaagacacccccaacagatatcatcgtgtacacggaacttccaaatgctgagccctgatccaaagttgtctcctgcccatgagcaccacagtcaggccttgaggggatcttctagggagacaacagccctgtctcaaaactgggttgccagctccaatgtaccagcagctggaatctgaaggcgtgagtctgcatcttagggcatcgctcttcctcacaccacaaatctgaacgtgcctctcccttgcttacaaatgtctaaggtccccactgcctgctggagagaaaacacactcctttgcttagcccacaattctccatttcacttgacccctgcccacctctccaacctaactggcttacttcctagtctacttgaggctgcaatcacactgaggaactcacaattccaaacatacaagaggctccctcttaacacggcacttagacacgtgctgttccaccttccctcatgctgttccacctcccctcagactagctttcagccttctgtcagcagtaaaacttatatattttttaaaataatttcaatgtagttttccctccttcaaataaacatgtctgccctcatggtttaggtaatgggactcttttcttgcctaaggcttccggtgttatcagtaccatgtccatataatcccatctgttctccaccgggttctcacctctggactctgagcttctggaagcagtgtggagcctcatttgtctctgggactccaatttccatccaaagatgcagcacataggaggttccaaggatcgggaatcacatgaacaagtgacattgttactctctgcagacctggaaagctggcagagtcattccacgatgaaacatttgtagagtcataggccttgttagtctcatctccatggggacacatatcaacacatcatctttcatactataaatatacggtcactcctccgtatctgtggggtttacaggtctttattgaacaaagtataaatcaaaaatattcagagaaaatatccacagagttccaaaactcataactatgttgaatggacacaaatgaagctgtgtgtaggctgtatcaggaattataagtaatcaagagatgatttcatgtatacaggaggatgtgcatatgttatttgcaagcgctgtgccatttcatataagaggcttgagcatctacagattttggtatctgagtggagatctcgaaaccaatcacccacgaatagtgaaggatgaccgtatatgacttttatttctcaaatttaaatataaatcaaaaaatgtacaactagataaaaactaagaagtgtttttatagtgtgagttagatttattttttactaggtgtaacccattggtttaatattatttattgagaagacattctatgccaccttaaaccacacggcagcctttgtcaactctaaagggactgtgtgtacatggatgtattttagacagtttctgctaaggggctgtctgtgtccacacacttgatgatgctacactttatgtagccttatagaaccctttaaatttagtagccagagccctctaatttgttattataggctatttgcttttttttttcttgaggcggagtcttgctctgtcgcccaggctggactgcagtgacacaatctcagctcactgcaacctccgcctcccaggttcaagcgattctcgtgcctcagcctcttgagtagctggcgttacaggtgcctgccaccaggcatggctaatttttggatttttagcagagacacggtttcactatgttggccaggctgctctcaatcccctcatctcagttgatccgcccacctcggcttcccgacgtgctggggaaacttgattttctatagcattatgttactggatatttctgtaaaatttaaaatgagggaggcagagagacagagagagatcaaactccagagttgggactctggaatcttgggtcatgagacaaattttagattaaactacaaaactccagaatttacaggtgtggtttttgctgataaagtacaattctaacattgtaaataattgcataatccttccctgggaatttaaatcattttaactggttctgctgtaatactagaaatacaagcatgaaaaattctaatggtttattagtcacaatgactctgaaaaccttaataatacctattaaatattttgcatattacacatgaagaagagtttgaatctcagataaaaacaataaaaatacatgaaaagtctttcacgttagcacagattttaggcatctcgtgttcaggaggttggatctgagacgtgttttgagttggtcatagtgaaggacgctaggtgtaaattctagtgagaacaatttccaggaagccgtgttccgctcttgagcgagcacccactgggcctcatgcaaggtagaatgagcctgcgtacgtcaccctcccatgatgtggtcaacatgtaaactgcatgggcagggcgccaaataacatcctgtgcgctgctgagctgagctggggcacggccgcctgtctgcaccggcagcaccatgtcgctcacggtcgtcagcatggcgtgtgttggtgagtcctggaagggaatagaggaagggagtgtggggttggagatctgggcccagaggtggagatataggcctggaggtggagttgtgggcctggagtggagatctgggcctggagtggatatatgggcctagagatggagtgatgggcctagaagtggagatctgggcctggagtgccgataggaacctggaggggagataggagcctggagtggagatatgggcctggaggtggagttataggcctatagtagagatatgggcctggagtggagatttgggccaggagtggagatatgggcctagaggtggatatctgggcctagagtggaaatatgggcctaggatggagatatgggcctggttgtggagatatgggactggagaggagatatgggcctagagtggagatatgggcttggggtggagatctgggcctggggtggagatatgggcctggaggtggagttacgggccttcagtagagatatgggcctggggtggagatatgggcttggggtggagatctgggcctggagtggagatatgggcctggaggtggagttactggccttcagtagagatatgggcctggtgtggagatatgggcctggattggagatatgggcctaggttggagatctgagcctggagtggagatatgggcctggattggagatatgggcttacagtggagatcttggcctggattggcgatatgggcctggattggcgatatgggcctatgatggaaatatcggcctggagtggagatatgggcctggagtggagatacaggcctagggtggaaatattggcctggagtggagatatgggcttgtggtggggatatgggcttgtggtggggatctgggcttggaggctgggtctctgcacagccgacagccctgttcttgggtgcaggtaggcactgagggtgagtttaacttcagtccaggaagggcctgcctaccaagactcacagcccagtgagggcagcaagggagggctggtttgcctgcagatggatcgtccatcatgatctttctttccagggttcttcttgctgcagggggcctggccacatgagggtgagtccttctccaaaccttagggtgtcatctccccacataagaggattttcctgaaacaggagggaagtcctgtcagggagcctctcataaactaggaagaggggaccctggggtgctcggcccacagttccgacctcgcctccctggcctttcattcccttggcagagtcaagttctgtggggaccagggttagactggggtgctcaaagctggggtgcgtggtggggaagtggtaggaacagcagatcctctgaggacaaaggtgttactcacacttcagcgtttccatgacggtaggggctgcagtgtggctgctgtcactccaccagaagaggtgggaaaccacagccatggccctgacattccaaatcctctgatgggggctcagttgcttattttcattcaggcatctgctgatattccattctcaaagacatgccctccaccccatgtctaccctgtgttgttttatgtgagtaatcttacagtattaaaatctagtaggagtctcttactcagcacttgctcaaagttctcagctgacacttttgttgtagggagacaccttgtgtttgcgggatgggtccttcctttagccctgggcaccaaggtgtgatagcagccatagaaacttggaaagcgaggagaatcttcagagcacagggagggaggggtggctccacatcctcctctctaaggcggtgcctccttctccccaaggtggtcaggacaagcccttgctgtctgcctggcccagctctgtggtgcctccaggacatgtgattcttcggtgtcattcttatcttgggtttaacaacttcagtctgtaaaaggaagatggggtgcctggcactgagctctacaacagaatattctggaagagccttttcatgggccctgtgaccccagcacacacagggacgtacagatgtcggggttcacacccacactaccccagtgggtggtcggcacccagcaacaccctggtgatcatggccacaggtcagagggctcctgtcttggattctcctttcccacctcctgaatcccagagcttctggtgggcgtgtccttgagggtcccatcacccaggccctgactatatttggggtaaagggggattgaatacagggaaatgggtgctgtggtgggaagaataattgtccccagtgatgactacattctaatccctggagtctgtgactatttatgttataggggaaggaactgaaggggaagatggagctcaggttgttgatgagttgaccttgagatggggagacagcctggactgtcccgctgggctcagtgtaatcacaagggtccacatgaaaggaggaggaagaggggagtggggattagagcagcgcaatgggagactccaccagctttgaaggtggaggaaggccaggagccatgaatgcaggtggcctgtagaggttggaaaagtcaaggaaatgattctccagagtctccagagggaacgaagccctgcagatgccttgattttagcccaggaaaaacagggtcctatttctgtctccagtagtgaaatgggtcagtgtgctctctcctgctgccatgcttctgataattttctacagcagcaacaggaaaccaacactggaacccaggtcaaggacaaggtaagaaacaacacaaggatagccgggtgtggtggcaggcgcatgtaatcctagcgacttgggaggctgagggcaggagaatcacttgaacccaggagacagaggttgcagtgaccctagaccacaccacttcactccagctggggtgaaggagtgagactctgtctccataattaattaattaattaaaggaaccaaacaaggggaaggttggctacaccgagatgagcaagtgtgggatgatgatgccaccaccaggctccatccacatagggaggggttgatactcctcaaaccagcaccaggagccagcctatggaagctggcaccatggagaaggcacaggcatggcaagagtggctcccagtcccgaccaggaacagggtgtgtggacactggtgcctgccttattcatcagttcatacctactgccaaggattccaattcatccaaaagagattgaaccaggctgataagaggctggatgtgcagcctatcctggttcctctttcacccccacataaacagcaggaaagacattagtgtgaaatagatacaacaccccaagagatgaggctaagcccagtgggaagggaatcagaggcgactagagacagagggacagagaagagggagggagacagatggaaggacctgcaccaggagttatgggcacagaaaagaacatgaagacacagagaggaaggagagagacagacaccagcaaggggaagcctcactcattctaggtgccatggatgggatgataaagagagacaccttctaaactcacaacctctcttcctaggagtccacagaaaaccttccctcctggcccacccaggtcccctggtgaaatcagaagagacagtcatcctgcaatgttggtcagatgtcaggtttcagcacttccttctgcacagagaagggaagtttaacgacactttgcacctcactggagagcaccatgatggggtttccaaggccaacttctccatcggtcccatgatggaagacctggcagggacctacagatgctacggttctgttactcactcccccatcagttgtcagctcccagtgaccctctggacatcgtcatcacaggtgagagtgtccggacattcttctcattgtcattgggatgcagagtgaatgatccacgacttggaacccccaggtagttgtaaggaagatgagcttggtattcttatggagagagactgacttggtgaggtctgtaccaacagagacagagaaacaggagacacaagtacagaccaggtgtcataacagaggacagacacaggggccataccgggagttagaaaagacagaaggagttaaaggagacagacagacagacatgtcccagagagaggtgtccctccatgctgactttgctcagagacctggcacaggttagaagtttcatttctgttttacctccacaaagtgttctctaccaggagaacccaaggacacccatatttctgacctgagttgggccctgtggcctcaggccttgtggcacctacagatgccgtgtttattctgacacctctgccttccatgtaatggagagtaaccgtcccaggatatcatggccccagaacaccaactcctgtatgctgtgtgaacttgtggtctccagactggattctgaggctcacattccaaataaccccacatatgaaaggatcactgagaggcacagagagaaatcagggacaccaaaaagcaaagacataaacacacagagaatgagccagaggaaggagattgagagactcacagacacataaagagagagaaaagagggcagaggagtggtgagaatgatggaagggagcagagaaaagcactaaaattagactcctgagggagaggcacaaggacatagaaagatggagatgtggggatgaattgcagagattccaaagagaactagagagaccgagaggcagagcaagacagatgatagatggatagatatagatagatgataaataggtagatgatagataataggttaaagatacatagatgatgattgattgattcattaatagatgagacatagagatgatgatgatgaagacagatagataatacatagagatagagaggcagacagaagtcatagagagagagatgatacatagatatagataacagatgattgatggatagatagacaagtgatagatacatagatgatatatagatatagatgacaggtagagaatttgtagataggcaccgaatagataaatagatagatcgatagataatagatagaaatatgcagaaagttatgaacaggacacaaagtgagaaacttagaatttaaaaaagtaacatcaagtcaaccaatccaaggagagtcagagagaataaaacaatccaaaaagggaaaacatatctagaggtgtggaagcgaggtcagagacctagagagacagagaaggtggaaggaggaaatagacatgaagagagatggggtggagggtgagagagagagagagagagagcattaggtcatagagcaggggagtgagttctcagctcaggtgaagggagctgtgacaaggaagatcctccgtaaggaaaatgcctcttctccttccaggtctatatgagaaaccttctctctcagcccagccgggccccacggttctggcaggagagagcgtgaccttgtcctgcagctcccggagctcctatgacatgtaccatctatccagggagggggaggcccatgaacgtaggttctctgcagggcccaaggtcaacggaacattccaggctgactttcctctgggccctgccacccacggaggaacctacagatgcttcggctctttccgtgactctccctacgagtggtcaaactcgagtgacccactgcttgtttctgtcacaggtgaggaaagcccatggctgtcccatgtcctatgatcctagagccttagctgaggagcttcctgctgaggatggagagaaggatgaacagatgcagagagaagacgaagcttgggtgtgagggagggatcagggcacaggatggcagacagggcacctccaaaccctcctacatggcctgcatgaaggcctgcggccaggactccaggcacccaggcagatggagaaagcggtcaggagagacccagaggagggagactgggctcagtttgggaagatcagaggttccctcagcccctcaacattacccatttcccagaagcccatcctggcctcccacccacacagggatgtcatcacctgcaacccctacaccctttacttttgtttgagaaatatttattgaggataaatatacctatatagcttaccacctttaacattttttttttgaggcggagtctagctctgtcccctatgctggagtgcattggcacaatctcagctcactgcaacttccgcctcctgggttcaagcgattctcttgcctcagccacctgagtagctggtgctacaggcgcgcaccaccatgccaggctactttttgtatttttagtagagagggggtttcaccatgttggtcaagctggtctcgaactcctgaccacgtgatccacccgcatcagcctcccaaagtgctgggattacaggcatgagccaccacgcccagccacatttaccatttttaagtgtaaagtctagtggtcataaatacattaatatatatatatatacacatatttttttttaccctccacccttttcttcctggcctctggtagccaccattctactctctaccttcatgagatccaccttttagctcctgtatatgggtaagaaatgggaatctttgtaatgacctccagttccatccatgtggctgcaaatatcaggatgtttttctttctatggaagagtagtctccactatgcaaatgtaccacattctctctatccattcacccactgatgggcaggtaggttgactcctcatcttggctactgtgaagagtgctgcaccaatcatacgagtgcagatatcacttcgatatattgatttactttcctttggatataaacccagtagtgaaattgctggatactatgaaagttctctttttagtttttcgtttgttgttttgtttttgtttttgagacagtttccctctgtgcccaggctggagtacaagtgatgtcatcttggctcattgcaacctctgcctcctgggttcaaatgattttcctgcctcagcctccctagtatcagggattataggcgcacgccaccatgcctggctactttttgttttttttagtatagatgcggtttccccatgttggctgggctgctctcaaactcatgacctcaactgaggtgcccgcctcggtctcccaaagtgccgggattacaggcatgatccacctcacccaacctctttttagttctttaaaggacttccacacttttctccgtaatggctgtactaatttacactcctaccaacaggataccaggattctcctttctctaacaccttgccagcatttcttttgcctgtcttgcagctaaaagccattttattttatttcattttattttgagatggagtttcgctcttgtcacccaggctgagtgcagtggtgcgatctcggctcaccacaacctccacctcccaggttcaagcgattctcctgcctcagcctcccgagtagctggaattacaggcacacgccaccacgcccgactaatttttgtatttttagtagagacagtgtttctccatgtgggtcagactggtctcaaactcccgaccttatgagattcacccacctcaggctctcaaagttctaggatgacagacgtgagccaccacgcccggcctaaaagccattttaatggggtgagatgaaaactcactttgattttaatttgtgtttctctgatgatgagtgatactgagcactttttcgtatgtggggaaatttcatgtcttttgctcctgtttcaattaaatcatttgttttattgagttgtttgagcttcttatatttctagttattaatcccatctcagatgcatagtttgcacatatttgctcccaatctgtgggttgtctcttcactttgttggtttatttttagcggtgcagaagttgcttagtttgaggtaatcccaatggtctatttttgcttcgattacttgtgttttgaaggtttaaaacaaaatgtcttccttcagacaaacgtcctggagcatttccccaatattttcttctacgtgtttcataggttcaggccttagactcacatctttaatccattttcatttgatttttgtgtatagtgacaggcagaggtgcagtttcattcctctgcatgtcgatgtccaggtttccctgcactgtttattgaaaagactgtcctttcctgattgtgagttcttggcacctttgtcaaagtccattggatgggctgggcatggtggctgacacctgcaatttcagcactttgggagcccgaggtgggtggatcacctgaggccaagagttcaagattagtctggccaacgtgatgaaacatcgtctccactaaaaatataaaaattagctgagcatggtggtcagcacctgtaataccactactcaggagtttgaggcaagagaagtgattgaacccaggaggctgtggtggcagtgaaccgagattgcacctctgcactccagcctgggtgacagagcaagactccatctcaaaagaaaaacaaaaaatacattggaggtaaatgcatggattatatctgtgttattcattctgctccgttgttctatgtgcctttcttcatgccaacgtcatgctgtcttgcttactacagctctgtaacatattttgagatcaggtagtgtgatgctcctgttttctctttataccttgaagtctcaagacagtagccgtcacatacaaaaattacggaaaaaaggatcccaggactcccagggcccaatattagataacagagtgttggccatgaaccaacctcaaagatttccactgagtagaggacagacaccctcatttcctcacctctctcctgtctcatgttctaggaaacccttcaaatagttggccttcacccactgaaccaagctccaaaaccggtgagtacagaaccctcttatatccgcttttggaaacctggggaggtggaaaccttggattcaggcgttgactcagcatctcacagctctgacattgtacgcctgtcttctaccatctccaaactccagatactccaacagcgaaagggatctggacccaaaacagggctctgtgaaatctcttaatctctcattttatggagctgagatctcctacaagctagaaaaatgattggcaatctgacatccttctcaggaaaaatgcaatgtttgttctgcctgcattcctaactggaggataaattcctgggggcttgagagagggaagggtagggaacatttgatgagggcgaggtgttttagagaagttccacttgcccaggaatgaattactgttggtcatgaagcaaccctggctgactcagcagagcaagagctttgccttaacagagaacggagctcatgcacgcacacttcgactcactgactcattcagccacggccccatgctcaggccgtggaaaaggcaattcccagcactgcaggaggccaaggcgggtggatcacttgaagtcaggagttccagaccagcctggccaaaatggtgaaaccctgtctctatgaaaaatacaaaaattagccgagcatggtggtgcatccctgtaatcccagctcctactcttgaggatgaagcaggagaacgacttcaacccaggaggtggaggttgcagtgagtggagattgcatcactgcactccagcctgggtgacacaaggagactccgtctcaaaaaataaaaataagaaatgcataaatataataaaacacacacgaatgacaaaggcacctgaattccaatcatcatttttgtatttctctataattacttctttgatcctttgtcttatccattaggcaatgagcctaaaacctcttccgtatttggctttctgtgagcatgagaccatatagaaaatgtgaaagcctgctgaatcctccagcacagatcgtggaatagagaaagtgctctgttcatcacaaaaaaaacttgccctctcactcaaatcccccacttcacccctacttccaatcacctgtggagattcagatagaccatggggaggtaaacattaatactccttggagtgagtccagatcttggaatgagagatcagcaccagcactagctcctgctcccctttcctactaattcacaggaggacaggtggtattgaagcaatagatggtggagggggtggtccttcccccagcctctcaggtagaacagcagcctaacatgtgtctcccgagatcacaaagagtaggacgtttcacaggggcttcaacacgatttcctggctgttggacataagataactctatttcgcttttttatcttgatttcacttttgtttcctttccttggagaacgcaagttgtttgactcaagaatgctgtggatgtagaaatcctaaagcacattcgctgtgtgtcaatcccagtgcagtcttcccagaaaagaccctaaacacctcctagactgcacctgggcctacgccaattcctatcactcaccgtcactccagggagacagaacacacagagaatacgttacataggcaggttcattactaacagataagcagcgagtgaaaacagaagcctacatttcaatgtgagccagtccctcaaggctcagaaaagctgctcgggacatatggagtcaccccatttgcagtgtagctgggggaagccagaaagcagcccagcctgggttttgtaccctggagccacaggaagcactcagctaaagcactgcatgacgtcctcctccaggaagaacaggaagacagcccaggctgctctgggacgttcctcctgatctcaggacgttgctgtcttagtccatttttgttgctctaaaggaacacttgagcctgggcaacttctaaagaaaagagattggtttgcctcaccgttctgcaggctgtactggaagcatggcaccagcatctatttctcgtgatggcctcaggctgctcccactctggcagaagggaaggagggtctgtctgtgcagagaccacagagatcacacggcaagagagggagcaagggggagggggagcgatggagcttccaagttcttttgaacaaccagctctccaggaactaatagagggggaactagctaaccccgtctccttgggacagcattgatctgttcatgatggatccacctccatgacccaaacacctctcaagaggcccaacctcccacaatgggggtgaaatttcaatgtgaggtttgaaggggtcaaacatctcaactaaagtagttgtgtcctcagcacattctatggttactttgagagctataactgagaaagcaggagaaagctgggtctcccgccatctgggtgcttgtcctaaagaggtgttttacgtggttacctgtcaatcaagaaatgcgagacaattcataaagaggaactgctatgattagcttcttattggtgtctcatcttcttccaggtaacccaagacacctgcacgttctgattgggacctcagtggtcatcatcctcttcatcctcctcctcttctttctccttcatcgctggtgctccaacaagaaaagtaagtctcacgaaggagaggccagagagctcagggccatgtggggaagcaggatgggagcactcaggtgtgtgttcctcacaggtaggatggtccctggcccaaggcagcagccacagaggcaggactttctagagagggcaccagactccctgtccctgctttcagctcacagaccgttgcctgattctgaactgtatcctcatgtcccctgcagccactcacatccaggagaaggttccatgacaggcagaaagtgggagacagaatcaatgggatgggaactcagagctattcatgggatgggtccttgagctcagagagatagaatgtctgagtctgctgttggcaactgagggacctcaggcacctatggcctccccctgtttgttggtatctgcttatgaaatgaggacccagaagtgccctccgagctcttttgttgacttccgtctcctacacatgctgctgtaatggaccaagagcctgcagggaacagaacagcgaatagcgaggtaggtgctcctcggcccagcctcgtggctagtgttattcccaaacagtcctggaaaacgtgagcaccctccctcactcaggatttccctctctccaggactctgatgaacaagaccctcaggaggtgacatacgtacagttggatcactgcgttttcacacagagaaaaatcactcgcccttctcagaggcccaagacacccccaacagataccagagtgtacacggaacttccaaatgctgagtccagatccaaagttgtctcctgcccatgagcaccacagtcaggccttgaggggatcttctagggagacaacagccctgtctcaaaaccgggttgccagctcccatgtaccagcagctggaatctgaaggcgtgagtctgcatcttagggcatcgctcttcctcacaccacaaatctgaatgtgcctctctcttgcttacaaatgtctaaggtccccactgcctgctggagagaaaacacactcctttgcttagcccacaattctccatttcacttgacccctgcccacctctccaaccttactggcttacttcctagtctacttgaggctgcaatcacactgaggaactcacagttccaaacatacaagaggctccctcttaacacggcacttagacacgtcctgttccaccttccctcatgctgttccacctcccctcagagtatctttcagccttctgtcagcagtaaaacttatatattttttaaaataatttcaatgtagttttccctccttcaaataaacatgtctgccctcatggtttcggtaatgggactcttttcttgcctaagacttccattatcattaccatgtccacataaccccatctgttctccactgggttctcacccccggactctgagtttctggaagcagggtggagcctcatttgtctctgggactcctatttccatccaaagatgtagcacataggaggttccaaggatcgtgaatcacatgaacaagtgatattcttactctctgcagacctggaaatctggcagagtcattccaagatgaaacatttgtagaatcataggccttgttagtctcatctacacagggacacatatcaacacatcatctttcacactataaatatacagtcactcctccatatctgtggggtttacagttctttattgaaccgagtataaatcaaaaatattcagagaaagtatccacagagttacaaaaagcagaactgtgttgaatggacacaaatgaagctgtgtgtaggctgcatcaggaattataagtaatctagagatgatttcatgtatacaggaggatgtgcataggttatttgcaaactctgtgccatttcatataagaggcttgagcatctacagattttggtatctgagtggagatctcgaaaccaatcacccacgaatagtgaaggatgaccgtatatgacttttatttctcaaatttaaatataaatcataaaaaatgtacaactagataaaaactaagaagtgtttttatagtgtgagttagatttattttttcctaggtataacccattggtttaatattatttattgagaagacattctatgccaccttaaaccacacggcagcctttgtcaactctaaagggactgtgtgtacacggatgtactttagacactgtttctgctaaggggctctctgtgtccacactcttgatgatgctgcactttatgtagccttatagaaccctttaaatttagtagccagagctctctaatttgttattataggctatttgcttttttttcttgaggcggagtcttgctctgtcgcccaggctggactgcagtgacacaatctcagctcactgcaacttctgcctcccaggttcaagcgattctcatgcctcagcctcttgagtagctggcgttacaggtgcctgccaccaggcacggctaatttttggatttttagcagagacacggtttcactatattggccaggctgctctcaaactccttatctcagttgatccgcccacctcggcttcccaacgtgctggggaaacttgattttctatagcattatgttactggatatttctgtaaaatttaaaatgagggagggagagagacagacggaaaacaaactccagagttgggactctggaatcttgggtcatgagacaaattttagattaaactacaaaactccagaatttacaggtggggtttttactgataaagtacaattctaagattgtaaataattgcataatccttccctgggaatttaaatcattttaactggttctgctgtaatactagaaatacaagcatgaaaaattctaatggtttattagtgacaatgactctgaaaacattaataatacctattagatattttgcatattacacaggaagaagagtttgaatctcagataaaaacaatagaaatacatgaaaagtctttcatgttagcacagattttaggcatctcgtgttcgggaggttggatctcagacgtgttttgagttggtcatagtgaaggacactaggtgtcaaattctagcgagaacaatttccaggaagccgtgttccgctcttgagcgagcacccactgggcctcatgcaaggtagaaagagcctgcgtacgtcaccctcccatgatgtggtcaacatgtaaactgcatgggcagggcgccaaataacatcctgtgcgctgctgagctgagctcggtcgcggctgcctgtctgctccggcagcaccatgtcgctcttggtcgtcagcatggcgtgtgttggtgagtcctggaaagcaatagagggagggagtgaggggatggagatctgggcccagaggtggagatataggcctggaggtggagttatgggcctggagtggagatctgggcctggagtggatatatgggcctagagatggagtgatgggcctagaagtggagatctgggcccagaggtcgagatataggcctggaggtggagtgatgggactgtagtggagatctgggcctggagtggagataggaacctggaggggagataggaacctggaggggagatatgggcctggaggtggagatatgggcctggagtggagtcatgggcctggaggtggagttatgggcctgcagtagagatatgggcctgaagtggagacatgggcctggagtggagatatgggccaggagtggagatatgggcctagaggtcgatatctgggcctggagtggagatatgggccaggagtggagatatgggcctagaggtcgatatctgggcctggagaggagatatgtgcctaggatggagatacgggcctgggtgtggagatatgggactggagaggatatatgggcctggagtggagatatgggactggagaggagatatggacctggagtggagataagggcctggattggagatatgggcccagggtggagatctgagcctggattggagatatgggcctggattggcgatatgggcttagggtggaaatatcggcctggagtggagatatgggcctggagtggagatatgggcttgaggtggggatatggacctggaggctgggtctctgcacagccgacagccctgttcttgggtgcaggtaggcactgagggtgagtttaccttcagcccaggaagggcctggctaccaagactcacagcccagtgggggcagcaagggtgccctggtttgcctgcagatgggtcatccatcatgatctttctttccagggttcttcttgctgcagggggcctggccacatgagggtgagtccttctcccaaccttcgggtgtcatctccccacataagaggattttcctgaaatgggagggaagtcctgtcagggagtctctcataaactaggaagaagggaccctggggtgctgggcccacatttctgaccttgcctccctggcctttcattcccttggcagagtcaagttctgtggggaccagggttagactacggtgctcaaagctggggtgtgtggtggggaagtggtaggaacagcagatcctctgaggacaaaggtgttactcacacacttcagcgtttccatgacggtaggggctgcagtgtggctgctgtcattctaccagaagaggtgggaaaaccacagccatggccctgacattccaatcctctgatggggactcagttgtttattttcgttcaggcatcggctgatattccattctcaaaggacatgccctccaccccatgtctaccctgtgttgttttatgtgagtaatcttacagtattaaaatctagtaggagtctcttactcagcacttgctcaaagttctcagctgacacttttgttgtagggagacaccttgtgtttgcgggatgggtccttcctttagccctgggcaccaaggtgtgatagcagccatagaaacttggaaagcgaggagaatcttcagagcacagggagggaggggcggctccacatcctcctctctaaggcggtgcctccttctccccacggtggtcaggacaagcccttgctgtctgcctggccaagccctgtggtgcctccaggacatgtgattcttcagtgtcattcttatcttgggtttaacaacttcagtctgtaaaaggaagatggggtgcctgtccctgagctctacaacataatattctggaacagccttttcatgggccctgtgaccccagcacacgcagggacctatacatgtcggggttcacaaccacactaccccagtgggtggtcggcacccagcaaccccctggagatcacggtcacaggtcagagggctcctgtctgggattctccttgtcccacctcctgaatcccagagctcctggtgggcgtgtccttgcgggtcccatcatgcaagtcctgactgtatttggggtaaagggggattgaatacagggaaatgggtgctgtggtgggaagaataattgtccccagtgatgactacattctaatccctggagtctgtgactatttatgatataggggaagggactgaaggagaagatggagctcaggttgttgatgagttgaccttgagatggggagacagcctggactgtcctgatgggctcagtgtagtcacaggggtccacatgaaaggaggaggaagaggggagtggggattacagcagcataatgggagtctccatcagctttgaaggtggaggaagtccaggagccatgaatgcaggtggcctatagaggctggaaaagtcaaggaactgattctcctgagtctccagagggaacgaagccctgcaggtgccttgattttacccacgacaaacagggtccgatttctgtctccagaattggaaggggttagtgtgctctctcctggtgccatgcttctgataattttctacagcagcaacaggaaaccaacactggaacccaggtcaaggacaagttaagaaacaacacaaggatagccaggcatggtggcaggtgcatgtaatcctagcgacttgggaggctgagggcaggagaatcacttgaacccaggagacagaggttgcagtgagcctagaccacaccacttcactccagcctgggcaaaggagtgagactctgtcgccaaaattaattaattaattaaagaaaccaaacaaggagaaggttggctacactgagatcagcaaggctcagatgatgatgccaccaccaggctccatccacatagggaggggttgatactcctccaaccagcaccaggagccagcctatggaagctggcactggcatggcaagagtggctcccagtccctaccaggaacagggtgtgtggccactggtgcctgccttactgatcagttcatacctcctgccaaggattccaattcgtccaaaagagattgaaccaggctgctaagagcctggatgtgcagcctatcctggttcctcttccacccccacatagacagcaggaaagacattagttcgaaatagatacaacagcccaagagatgaggctgagcccagcggcaagggaatcagaggctactagagacagagggacagagaagagtgagggagacagatggaaggacctgcaccaggagttatgggcacagaaaagaacatgaagacacagagaggaaggagagagataagacaccaggaaggggaagcctgactcaatccaggtgccatggatgggatgataaagagagacaccttctaaactcacaacctctcttcctaggagtccacagaaaaccttccctcctggcccacccaggtcgcctggtgaaatcagaagagacagtcatcctgcagtgttggtcagatgtcatgtttgaacacttccttctgcacagagaggggatgtttaacgacactttgcgcctcattggagaacaccatgatggggtctccaaggccaacttctccatcagtcgcatgacgcaagacctggcagggacctacagatgctacggttctgttactcactccccctatcaggtgtcagctcccagtgaccctctggacatcgtgatcataggtgagagtgtccagactttcttctcattgtcattgggatgcagagtgaatgatccaggaattggagacccaggtggctgtaaggaagatgagcttggtattcttatggagagagactgacttggtgaggtctgtgccaacagagacagagaaacaggagacacaagtagagaccaggtgtcataacagagaacagacacaggggccataccgggagttagaaaagacagaaagagttaaaggagacacacagacagacatgtcccagagagaggtgtccctccatgctgactttgctcagagacctggcacaggttagaagtttcatttctgttttacctccacaaagtgttctctaccaggagaacccaaggacacccatatttctgacctgagttgggccctgtggcctcaggccttgtggcacctacagatgccatgtttattctgacacctctgccttccatgtaatggagagtaatcgtcccaggatatcatggccccacaacaccaacccctgtatgctgtgtgaacttgtagtctccagactggattctgaggctcatattccaaataagcccacttatgagaggatcagtgagaggcacagagagaaatcagggacaccaaaaagcaaagacataaacacacagagaatgagccagaggaaggagattgagagactcacagacacataaagagagagaaaagagggcagaggagtggtgagaatgatggaagggagcagagaaaagcactaaaattagactcctgagggagaggcacaaggacattgaaagatggagatgtggggatgaattgcagagattccaaagagaactagagagaccgagaggcagagcaagacagatgatagatggatagatatagatagatgataaataggtagatgatagataataggttatagatacatagatgatgattgattgattcattaatagatgagacatagagatgatgatgatgaagacagatagatagataatacatagagatacagaggcagacatagagaaatcatagagagagagagatgatacatagatatagataatagatgattgatggatagatagacaattgatggataaatagatgatatatagatatagatgacaggtagagaatttgtagataggcaccgaatagataaatagatagatcgatagataatagatagaaatatgcagaaagttatgaacaggacacaaagtgagaaactcagaattaaaaaaagtaacatcaagtcaaccaatccaaggagagtcagagagaataaaacaatccaaaaagagaaaacatatctagaggtggggaagtgaggtcagagacctagagagacagagaaggtggaaggaggaaatagacatgaagagcgatggggtagagggtgagagagagagagagagagcattaggtcatagaacaggggagtgagttctcagctcaggtgaagggagctgtgacaaagaagatcctccctgaggaaactgcctcttctccttccaggtctatatgagaaaccttctctctcagcccagctgggccccacggttctggcaggagagaatgtgaccttgtcctgcagctcccggagctcctatgacatgtaccatctatccagggaaggggaggcccatgaacgtaggctccctgcagggcccaaggtcaacggaacattccaggctgactttcctctgggccctgccacccacggagggacctacagatgcttcggctctttccatgactctccatacgagtggtcaaagtcaagtgacccactgcttgtttctgtcacaggtgaggaaagcccatggctgtcccatgtcctatgatcctagagccttagctgaggagcttcctgctgaggatggagagaagcatggacagatgcagagagaagacgcagcctcggtgtgagggagggatcagggcacaggatggccgacagggcacctccaaaccctcctacatggcctgcatggaggcccacggccagggctccaggcacccaggcagatggagaaagcggtcaggagagacccagaggagggagactgggctcagtttggggagatcagaggttccctcagcccctcaaccttacccatttcccagaagcccatcctggcctctcacccacacagagatgtcatcaccagcaacccctacaccctttacttttctttgaagaaatatttattgaggataaatatacctatatagcttaccacttttaacatttttttttgaggtggagtctagctctgtcccctatgatggagtgcagtggcacaatctcagctcactgcaacctccgcctcctgggttcaagcgattctcctgcctcagccacctgagtagctagtgctacaggcacgcaccaccacgccaggctactttttgtatttttagtagagaggtggtttcaccatgttggtcgagctggtctcgaactcctgaccacgtgatccacccgcatcagcctcccaaagtgctgggattacaggcatgggccaccaggcccagccacatttaccatttttaagtgtaaagtctagtggtcataaatacatttttatatatatatatatatacattttttttaccctccacccttttcttcctgtcctccagtagccaccattctactctctaccttcatgagatccaccttttagctcctgtatatgggtgagaaatgggaatctttttaatgacctccagttccatccatgtggctgcaaatgacaggatgttattctttctatggatgagtagtctccactgtgcgtatgtactacattctctctatccattcacccactgatgggcaggtaggttgactcctcatcttggctactgtgaacagtgctgcaccaatcatacgagtgcagatatcacttcgatatgttgatttactttcctttggatataaacccagtagtgaaattgctggatactatgaaagttctcttttttttttttttttcttttttgagaaagagtttccctccttagcccaagctggagtcaaagtggtgcaaccttggctcattgcaacctccgcctcctgggttcaaatgattttcctgcctcagcctccctagtagctgggattacaggtgcacaccaccatgcctggctactttttggtttttttagtatagatgcggtttccccatgttggctgggctgctctcaaactcatgacctcaactgaggtgcccgcctcagtctcccaaagtgccgggattacaggcatgatccacctcacccaacctctttttagttctttaaaggacttccatacttttctccgtaatggctgtactaatttacactcctcccaacagggtaccagggttctcctttctctaccaccttgccagcatttcttttgcctgtcttgcagctaaaagccattttattttatttcattttattttgagatggagttttgctcttctcacccaggctggagtgcagtggcgctatctcggctcaccacaacctccacctcccaggttcaagcgattctcctgcctcagcctcccgagtagctggaattacaggcacacgccaccacgccctactaatttttgtatttttagtagagacagcgtttctctatgtgggtcagactggtctcaaactcccaaccttatgagattcacccacctcaggttctcaaagttctaggatgacacaagtgagccacctcacccggcctaaaagccattttaatggggtgagatgaaaactcactttgattttaatttgcgtttctctgatgatgagtgatactgagcactttttcgtatgtggggaaatttcatgtcttttgctcctttttcaattaaatcatttgttttattgagttgtttgagcttcttatatttctagttattaatcccatctcagatgcatagtttgcacatatttgctcccaatctgtgggttgtctcttcactttgttggtttatttttagcagtgctgaagttgcttagtttgaggtaatcccaatggtctatttttgcttcgattacttgtgttttgaaggtttaaaacaaaatgtcttccttcagacaaacgtcctggagcatttccccaatattttgttctacgtgtttcataggttcaggccttagactcacatctttaatccattttcatttgatttttgtgtatggtgacaggtagagttgcagtttcattcctctgcatgtagatgtccaggtttccctgcactgtttattgaaaagactgtcctttcctgattgtgagttcttggcatctttgtcaaagtccattggatgggctgggcttggtggctaacacctgcaatttcagcactttgggagcccgaggtgggtggatcacctgaggccaggagttcaagattagtctggccaacgtgatgaaacatcgtctccactaaaaatataaaaattagctgagcatggtggtcagcacctgtaataccactactcaggaatttgaggcaagagaatgattgaacccaggaggctgaggttgcagtgaaccgagattgcacctctgcactccagcctgagtgacagagcaagactccatctcaaaagaaaaaataaaaaaccattggatgtaaatgcatggaatatatctgtgttattcattctgctccgttgttctatgtgcctttctttatgccaatgtcatgctattttgcttactacagctctgtaacatattttgagatcaggtagtgtgatgctcctgttttctctttatatcttgaagtctcaagacagtgggtgtcatataaaaaaattatggaaaaaaggatcccaggactcccagggctcaatattagataagagagtgttggccatgaaccatcctcaaagatttccactgagtggaggacagacaccctcatttcctcacctctctcctgtctcatgttctaggaaacccttcaaatagttggccttcacccactgaaccaagctccaaaaccggtgagtacagaaccctcttatatccgcttttggaaccctggggaggtgggaaccttggattcaggcgttgactcagcatctcacagctctgacattgtacacttgtcttccaccatctccgaactccagatactcctacagcgaaagggatctgggcccaacacagggctcagtgaaatctcttcatctctcattttatggagctgagacctcctacaagctagaagaatgattgccaatctgacatccttctcaggaaaaatgcaatgtttgttctacctgcattcctaactggaggataaattcctggagacttgagagagggaagggaagggaacatctgatgagggcaaggtgttttagagaagttccacttgccaaggaatgagctcctgtaggtcatgaagcaaccctggctgactccgcagagaaagagccttgccgtaacagagaacagagctcatgcacgcacacttcgactcactgactcattcagccacggccccatgctcaggctgtgcagtgtggaaccttttcctattgttgccataacaaatttccacaagattcgtgggtgaaaacaaaacggttttttaattatcttacagtgctgtagctcaaagtaggaagtgcatcttactgggctaaaatcaaggtgacagcaaggctgccttccctctgaggattccaggcacgaatctgcttctcacttgtcccagcttctaaaggctcccagttccttggctcctggtccccttcctccttcctcaaagcccacaaagactggtcacatctcacatggcatcactcagtgccttcttccttaccacacctctttctctgagtgctgctctcccttcttcctcatcttttgaaaacttggggattctattgggttcaccaagatgaaaatccctcataatctcctggaaatcatccaggatacccttgttttaagttcagctgattagcaaccataattccatctgcaatcttcattcctcctttccatgtaaaataacatattcacaagctatggaggctaggacagggacattttggggtgggacagcattctcctgccttccacaaacagtgaacaagatgcatttggcctctgcccttgggacactgatattgcagatggttaaatgggagggcagaaaatgaacgcacaagtggatctataaatgaatggtccattgggaagcatctgtgcatgaaatctattttttgtttgttcttttgtttattgagacagagtcgccctctgtcttccaggctacagtgcagtgtcacgatcttggctcactgcaacctgcgtctcctggattcaagtgattctcctgcctccgcctctcgagtagctgggattacaggcaactgccaccgtgcccggctaattctttttgtatattttttgtagagaggatgtttcaccacgttggccaagcttgtctgaaactcccaacctcaagtgatccgaccgtctcagcatgccaaagtaatgggactacaggcgtgagccactgtgcccagccagaattcaaaatcaataatagataatgctgagtgtatgatttcaggtgacaaagaaggtctcactattcagatatttgtgacattaatgaaaaacacggaatgaacccctgaaagattggcggaaggattttgcacacacagctgtcagccatgaaggcacaaaggtgaaaacaatctgatgtggaaggaagaggctctgactcaaatgctgggaatgaggtggggagaatgacaagacgactgtagagagacggagagcacactgggtacacaggaaactaaggagcaacaaggagtgtgtgtttgacactcacagccattggattcacctcggggtaaccaggaatccctacatgattaatatgactgacatgaaaataagggaggcccaggtgcataactggaatctaggagaccgtggaaaaggcaattgccgccccactggtgaaatgtggtgctgatttagacactaaatgaatgaagtagatggatataagatatgtttgtgaggtagaatcattgactggaaaggcttactgggtttgattttcctacttgtttaatcctcgcttaattaatttctttctgagatttattcatcctacacataaatcaatacctggcaaaggagtgacagatatatgagtggtggtggaaatgaagagacttattatagcataatatacaagtctgtgaacagtggctcacgcctgtaacctagcactgcaggaggccaaggtgggtggattccatgaagtcaggagttccagaccagcctggccaacgtggtgaaaccctatctctactaaaaatacaaaaattagccgagcacgatggtgcatccctgtaatcccagctcctattctggaggatgaagcaggagaatgacttcaacccagtaggtggaggttgcagtgagtggagattgcatcactgcactccagcctgggggacacaaggagactctatctcaaaaaataaaaataagaaatacataaatataataaaacacacacgaatgacaaaggcacctgaattccaatcatcgtttttctatttctctataattacttctttgatcctttatcttatccattaggcaatgagcctaaaacctcttccctatttggctttctgtgagcatgagatcatatagaaaatgtgaaagcccgctgaatcctccagcacagatcctggaatagagaaagtgctctggtcatcacaaaaaaaacttgcccactcacccaaatcccccacctcacccctacttccaatcacctgtggagattcagatagaccatggggaggtaaacattaacactccttgaagtgagtccagatcttggaatcagagatcagcgacagcactagctcctgctcccctttcctactaattcacaggaggacaggtggttttgaagcaatagatggccgagggggtggtccttcccccagcctctcgggtagaacagcagcctaatatgtgtctcccgagatcacaaagagcagcaggtttcacacgggcttcaacactatttcctggccgtttgacataagagaattctatttcgctttttttatcttgatttcacttttgttttctttccttggagaatgcaagttgtttgattcaagaatgctgtggatgtagaaaccctaaagcacattcgctgtgaatcaatcccagtccagtcttcccagagaagactctaaacacctcctggactgcacctgggcctatgccaattcctatcactcaccgtcactccagggagacagaacacacagagaatacgttacataggcaggttcattactaacagataagcagcgagtgacaacagaaacctatatttcaatgtgacccagtccctcaaggctcagaaaagctcctcgggacatatggagtcaccccatttgcagtgtagctgcgggaagccagaaagcagcccagcctgggttttgtaccctggagccacaggaagcactcagctaaagcactgcatgacgtcctccaggaagaacaggaagacagcccagggtgttctgagacgttcctcctgatctcaggaagttgctgtcttaggccatttttgttgctctaaaggaacacttgagcctcggtaacttctaaagaaaagagattggtttgcctcaccgttctgcaggctgtactggaagcatggcaccagcatctatttctcgtgacggcctcaggctgctcccactctggcagaagggaaggagggtctgtctgtgcagagaccacagagatcacacggcaagagagggagcaagggggagggggagtgatggagcttccaagctctttttaacaaccagctctccgggaactaatagagggggaacttgctaaccccgtctccttgggacagcattgatgtgttcatgatggatccacctccatgacccaaacacctctcaagaggcccaacctcccacagtgggggtgaaatttcaatgtgaggtttgaaggggtcaaacatctcaactaaagtagtcgtatcctcagcacgttctatggttactatgagagctataacagaaaaagcaggagaaagctgggtctcctgccatctgggtgcttgtcctaaagaggtgttttatgtggttacctgtcaatcaagaaatgcgagacaattcataaagaggaactgctaagattagcttcttattggtgtctcatcttcttccaggtaacccccgacacctgcacattctgattgggacctcagtggtcatcatcctcttcatcctcctcttctttctccttcatcgctggtgctccaacaaaaaaagtaagtctcacgaagcagaggccagagagctcagggccatgtggggaagcaggatgggagcactcaggtgtgtgttcctcacaaacaggatggtccctggcccaaggcagcagccacagaggcaggactttctagagagggcaccagactccctgtccctgccttcaactcacagaccgttgcctgattctgaactgtatccccatgtcccctgcagccactcacatccaggagaaggttccatgacaggcagaaagtgggagacagaatcaatgggatgggaactcagagctattcatgggatgggtccttgagctcagagagatagaatgtctgagtctgctgttggcaactgagggacctcagccacctatggtctccccctgtatgttggtatctgcttatgaaatgaggacccagaagtgccctccgagctgttttgttgacttccatcttctacagatgctgcggtaatggaccaagagtctgcaggaaacagaacagcgaatagcgaggtaggtactcctcggcccgggctcgtggctactgttattcccaaagagtcctggaaaatgtgagcaccctccctcactcagcatttccctctctccaggactctgatgaacaagaccctcaggaggtgacatacacacagttgaatcactgcgttttcacacagagaaaaatcactcgcccttctcagaggcccaagacacccccaacagatatcatcgtgtacacggaacttccaaatgctgagtccagatccaaagttgtctcctgcccatgagcaccacagtcaggccttgagggcgtcttctagggagacaacagccctgtctcaaaaccgggttgccagctcccatgtaccagcagctggaatctgaaggcgtgagtctgcatcttagggcatcgatcttcctcacaccacaaatctgaatgtgcctctctcttgcttacaaatgtctaaggtccccactgcctgctggagaaaaaacacactcctttgcttaacccacagttctccatttcacttgacccctgcccacctctccaacctaactggcttacttcctagtctacttgaggctgcaatcacactgaggaactcacaattccaaacatacaagaggctccctcttaacgcagcacttagacacgtgttgttccaccttccctcatgctgttccacctcccctcagactagctttcagtcttctgtcagcagtaaaacttatatattttttaaaataacttcaatgtagttttccatccttcaaataaacatgtctgcccccatggtttcggtaatgggactcttttcttgcctaaggcttccggtgttatcagtaccatgtccatataatcccatctgttccccactgagttctcatccccggactctgagtttctggaagcagggtggagcctcatttgtctctgggactccaatttccatccaaagatgtagcacataggaggttccaaggatcacgaatcatatgaacaagtgatactcttactctctgcagacctggaaagctggcagagtcattccacaatgaaacatttgtagaatcataggccttgttagtctcatctccatggggacacatatcaacacatcatctttcataatataaatatacggtcactcctccatatctgcggggtttacaggtgtttattgaaccaagtataaatcaaaaatattgagagaaagtatccacagagtttcaaaaagcataactatgttgaatggacacaaatgaagctgtgtgtaggctgtatcaggaattataagtaatctagagatgatttcatgtatacaggaggatgtgcataggttatttgcaaacgctgtgccatttcatataagaggcttgagcatctacagattttggtatctgagtggagatctcaaaaccaatcacccacgaatagtgaaggatgaccgtatatgacttttatttctcaaatttaaatataaatcataaaaaatgtacaactagataaaaactaagaagtgtttttatagtgtgagttagatttattttttcctaggtgtaaccaattggtttaatattatttattgagaagacattctatgccaccttaaaccacacggcagcctttgtcaactctaaagggactgtgtgtacatggatgtattttagacactgtttctgctaaggggctctctgtgtccacactcttgatgatgctgcactttatgtagccttatagaaccctttaaatttagtagccagagccctctaatttgttattataggctgtttgctttttttttcttgaggcggagtcttgctctgtcgcccaggctggactgcagtggcacaatctcagctcactgcaacctccgcctcccaggttcaagcgattctcgtgcctcagcctcttgagtagctggcgttacaggtgcctgccaccaggcacggctaatttttggatttttaacagagacacggtttcactatattggccaggctgctctcaaactccttatctcagttgatccgcccacctcggcttcccaacgtgctggggaaaacttgattttctatagcattatgttactggatatttctgtaaaatttaaaacgagggagggagagagacagacagagagcaaactccagagttgggactctggaatcttgggtcatgagacaaattttagattaaactacaaaactccagaatttacaggtgtggtttttgctgataaagtacaattctaagattgtaaataattgcataatccttccctgggaatttaaatcattttagctggttctgctgtaatactagaaatacaagcatgaaaaattctaatggtttattagtcacaatgactccgaaaacattaataatacctattagatactttgcatattacacaggaagaagagtttgaatctcagataaaaacaaaaaaaatacatgaaaagtctttcatgttagcacagattttaggcatctcgtgttcggataaaaatacatgaaaagtctttcacgttagcacagattttaggcatcttgtgttcgggaggttggatctgagacgtgttgtgagttggtcatagtgaaggacgtgaggtgccaattctagtgagaacaatttccaggaagccgtgttccgctcttgagcaagcatccactgggcctcatgcaaggtagaaagagcctgcgtacgtcaccctcccatgatgtagtcaacatgtaagctgcatgggcagggcgccaaataacatcctgtgcgctgctgagctgagctggggcgcggccgcctgtctgcaccggcagcaccatgtcgctcatggtcgtcagcatggcgtgtgttggtgagtcctggaaaggaatagagggagggagtgccacatcctcctctctaaggtggcgcctccttctcccccaggtggtcaggacaagcccttcctctctgcctggcccagccctgtggtgtctgaaggagaacatgtggctcttcagtgtcgctctcgtcttgggtttaacgaattcagtctgtccaaagaagacgggatgcctgtccctgagctctacaacagagtattccgaaacaccgttttcataggccctgtgaccccagcacatgcagggacctacagatgtcggggttcacacccacacttcctcactgggtggtcagcacccagcaaccccctggtgatcatggtcacaggtcagagggctcctgtctgggattctccttgtcccacctcctgagtcccagagcttctggtgggagtgtccaccagcgtcccatcatccagaccctaactgtatttggggtaaaaggggattgaatacagggaaatgggtgctgtggtggaaagaataattgtccccaatgatgactgcattctaatccctgcagtctgtgactatttatgttataggggaaggcactgaaggggaagatggagctcaggttgttgagttgaccttgagatggggagacagcctggactgtcctgctgggctcagtgtaatcacaagggtgcacatgagaggagaaggaagaggggagtggcgattagagcagtgcaatggaagtctccatcagctttgaaggtggaggaaggccatgagccatgaatgcaggtggcctatagaggctggaaaagtcaaggaactgattctcctgggtctccagagggaacgcagccctgcagatgccttgattttagccctcaaaaaacagggtccgatttctgtctccagaaacggaaggggtcagtgtgctctctcctgctgccatgcttctgataattttccacagcaccaacaggaaaccaacactggaacccaggtcaaggacaagataagaaaggacacaaggatagccgggcgtggtggcaggtgcatgtaatcctagcaactcaggaggctgagggcaggagaatcacttgaacccaggagacagaggttgcagtgagcctagaccacaccacttcactccagcctgggtgaaggagtgagactctgactccaaaattaattaattaattaaagaaaccaaacaaagagaaggttggctacaccgagatcagcaagggtgggatgatgatgccaccaccaggctccatccacatagggaggggttgatactcctcaaaccagcaccagaagccagcctatggaagctggcaccatggagaaggcacaggcatggcaagagtggctcccagtccccaccaggaacagggtgtgtggacactggtgcctgccttactgatcagttcataccttctgccaaggattccaattcgtccaaaagagattgaaccagtctgctaagagcctggacgtgcagcctatcctggttcctcttccacccccacatagaagcaggaaagacattagttcgaaatagatacaacagcccaagagatgaggctgagcccagcggcaagggaatcaggagctactagagacagagggacagagaagagggagggagacagatggaaggacctgtaccaggagttatgggcacagaaaagaacatgaagacacagagaggaaggagagagataagacaccagcgaggggaagcctcactcattctaggtgccatggatgggatgataaagagagatgccttctaaagtcacaacctctcttcctaggagtccacagaaaaccttccctcctggcccacccaggtcccctggtgaaatcagaagagacagtcatcctgcaatgttggtcagatgtcatgtttgagcacttccttctgcacagagaggggaagtttaatgacactttgcgcctcactggagagctccatgatggggtctccaaggccaacttctccatcggtcgcatgacgcaagaccttgcagggacctacagatgctacggttctgttcctcattccccctatcagttgtcagctcccagtgaccctctggacatcgtgattacaggtgagagtgtctggacattattctcattgtcactgggacacagagtgaatgatccacgacttggaggcccaggtggttataaggaagatgagcttggtattcttatggagagagactaacttggtgaggtctgtaccaacagagacagagaaacaggagacacaagtacagaccaggtgtcataacagaggacagacacaggggccatacagggagttagaaaagacagaaagagttaaaggagacacagacagacatgtgccagagagaggtgtccttccatgctgactttgctcagagacctggcacaggttagaagtttcatttctgttttacttccacaaagtgttctctaccagaagaacccaaggacacccatatttctggcctgagttgggccctgtggcctcaggccttctggcacctacagatgccgtgtttattctgacacctctgccttccatgcaatggagagtaatcgtcccaggatatcatggccccagaacatcaacccctgtatactgtgtgaacttgcggtccccagactggattctgaggctcacattccaaataaccccacatatgagaggatcactgagagacacagagagaaatcagggacaccaaaaagcaaagacataaacacacagagaatgagccagaggaaggagattgagagactcacagacacataaagagggagaaaagagggcagagaagtggagagaacaatggaagggaacagagaaaagcactaaaattagagtcctgagggagagacacaaggacatagaaagatggagatgtggggatgaattgcagagattccaaagagaactagagagaccgagaggcagagcaagacagatgatagatggatagatatagatagatgataaataggtagatgatagataataggttatagatacatagatgatgattgattcattcattgattaatcgatgatacatagagatgatgaagatgaagatagatagataatacatagagatagagaggcagacaaagagaaatcatagagagagagagacgatacatagatatagataatagatgatttttggatagacaattgatagataaatagattatatatagatatagatgacaggtagagaatttgtagataggcaccaaatagataaatagatatatcgatagataatagatagaaatatgcagaaagttatgaacaggacacaaagtgagaaactcagaatttaaaaaaagtaacatcaagtcaactagtccaaggagagtcagagagaataaaacaatccaaaaagggaaaacatatctagaggtgagaaagtgaggtcagagacctagagagacagagaaggtggaaagaggaaatagacataaagagagatggtgtggagggtgagacagagagagagagcattaggccatagagcaggggagtgagttctcagctcaggtgggaggggagttgtgacaaggaagaacctccctgaggaaactgcctcttctccttccaggtctatgtgggaaaccttctctctcagcccagccgcgccccatggttaaggcaggagagagcgtgaccttgtcctgcagctcccggagctcctatgacatctaccatctatcaagggagggggaggctcatgaacttaggttccctgcagtgcccaaggtcaatggaaccttccaggccaactttcctctgggccctgccacccacggagggacctacagatgcttcggctctttccgtgactctccctacgagtggtcagaccttagtgacccactgcttgtttctgtcacaggtgaggaaaccagtctgttccccaaatagtgggactcagatggactacaatggccacattcaggggagcctcagatggagggggtggccatgggggtgtcagccagagatgctggacagaagagacacaaagcaaacatacagaaagaggcatagacagacagacagagcgaggcagacagatcacattagggtttggggtggtaactgcaaccctacctgaagcttgcagatagagcacaggccacataaaccacttcccagtctttgtacagaagcccacctgggacacatgtaaacagcatcaatgctgactcaggagcatgaaaggccgggctcagattggaaagactagaggtagcattggccgcccgccattgcccatttccagaagcccccacctctcaccaaagagtgatttccacatggggggcacagatgcaaccatcgttgggggagccccaatgtctcttgatgggaggcattttccaccctagatgttttttgctctctccacaccttggagactcagtgggggagtcttctctggggactcggggagggcctccctgggactcgcaggatttccaagctagatgacaacatgacaggtggaaacaggcccattccttcgccaggggccccaagctccatcccaggagatgagaagaggctcttctcattggtcagtggatccctgaggggacagaggctcagcactgaaggctgagaaggatctgccacttcgctcagtggcctcaagccagacatcttccctacagacttgcagtgattctccatcagcatttagggctgtggccaccaacctgggtgttggtctgtaggaacttttcatttctgaccttccataactgagttctcttcctaaatgtggaatgccttgtactccatgttactctctccccagaaagaatgtgtggcttgtctgctctccagccctgtcatggagattgataatccttagggagcaagaggagagggaaagaacaaagtatgagaccacctaggtgctactggttgaggttccatttgccagtgaagggacttcactcagccgagggggcaactcagggaagtcagccgagggagggcattagagtagagagaactgagctcacccagtaaatgaccccttcactaactcattcatctaatatttatttcacacctaccatcagttctctctgtttcacggccaggagtagacagcacggccaagctcctgggttcatgatgctcacattgctgtggggtgggagagagaggcagaacatgaatgaatgaatgagagaatgaatgaatgagtgaatgatggaatgagtgaatgaatgaatgaatgaatgtatgaattagtgagtgaatccttagcacttggtgaaagtgccatgcacagaatgaaatgaatgaacgtggaacgttgtcatttggagtgtacaggagggaacgtctcactgagacctcatcagagagatcacatttaaactccgatcttagagacaagagggagtgagccctggggagtgtgttgaaaggaactttcatggacttaggacattggggatgaccctaatgtgagaatgagcttggtgtgttccaagaagtccatggacctgccatatggtgagggctggtcagaatccagagagatttctaaatgcccttgtgcttgtaaggaaagtgagtcctgtggttgggagtggacttataccttgggtcaggtccagcaattatctttctaaatcctctctaattgcctgaaccacttctatcaacaactgagaaaagaggagtgttaaacaccccactgtggccgtggatttgcctacctgtccatttatttccgcgactcttcctccatgtatatttgcaggaatattactgggagtggttaagtgtaaactgattatatattcctggtaaatttaaaatgctataaatttacctgcttttttcctacattttatgcttaatgttttccgctgatttttcccaaagactaattttgtctaattttaatatagttataccacatttctaacagtgattgcttggtatatttctacattgtttaatttcaaactccatgaattgttaacattgagatgtgtcctttgtaaatttcaaacaattcgccttagaaagtaagactttctgacaatcttttgttcatgtttgagcagttcttccaatcatatttttgttattattacgttgtgttttcctgattccctttttttcccactgacttctgtggttttctatttcaaacattctatttttgatctatgtcgtttaggaatacatatatggtgtactcatcctgaagttgttacatatttttaaaattgaaattaatcatttcagagattaaactgcaaatataaaaacatatttccactcttcctgtgtaagaacaggattttagagcatatttagtacatatgtttgtatttacttatatgatgttttgttttgtggtatacataattctatctttttcagaaattacacaggggcgtgttttcatacactatcgtatggtccatattcatttttggcatagccatatttttagttcttcctctgctcttagttattgtcagaatcttcgacaccccatctggtttcactttctttatctttgaggcacggtcatcagaatttcctttagggtcagtgagaaaagctttctttgcccttttgtctttcagttctgtttctttcctgcgttgatcttggacagtaactgtactatgtaaggaattgtcggtggctggcgacggtatcttagctgggtaaagatgctattctactggcttatgttttccttttttctgtggggaagacaatgcttggctccctataaatccttaccagctgatccttttcctctggctaattttaagggttggttgtgcttttatgctgcttttctgtaatgttgaacgtgaggtgtgtttacttcattctgcctggcattcactggatttcttgaacctgtggattgatggatgtgtctacttcctccaaataatcaacaattgcctctttaaagattgcttctgacctgttttctcgttctttctttttggaactcaagttaggagcattctaaaactgttgtcaatttttaccctgtcacaaaactgctctttcttgtttcagttatttgctttttctgtgcattaatattgatggtttcctctgtcatagaggataaatactctcttcactgttgtgtacacaacattttaactagttattctggtttaaatttaatattgactttatctacatatcacaattgattactgtgtacagactttcttttctattagtataaatttatgaggtacacttgtaattttgtgacatgagtatgttgcagagtagtgaagtcaggacttttactatatccatcacccaaataccgtacattgtactcattaagcaaattctcatcactcacccacgtcccgccaccctccagccttctagcctccgctgtccgtcattccacactctacgtccatatgtacacattactcccctcccatgtagagtgagaagatgtggtatttgtctttctgagtggttttatgtaaaataatggcgtccagctccatctatgttgctgcaaaagacatggttttatttttatgaccaaatagtatttcgttgtgtatacacgcatcctttttttaatccaatcattcattcacagacacttagattgatttcatatctttgctattgcaaacagtgctgcaataaacatacaggtgcaggtattttttgagtagatacccagcagcgggacccctagatcgaatggtgcttctatttttggttctctgccaaatttccatactgtcttccatagaggctatactaatttacataccggccaacagtgtataagagtttccttttctctgcatccttgccaacacctgttatatgtttcactttttctttttttctttttgagatggagtcttccactgtcacccaggctggagtgcagtgccgccatctccacgcgctgcaacctccaccaaccaggttcaaatgattctcctgcctcagcctcctgagtagctgggattacagaaccacaccaccatgcccagctaatcttttgtatatttagtagagatggggtttcactatgttggtcaggctggtctcaaactcctgacctcatgatccacccgcctcagcttcccaaagtgctgggattacaagcgtgagccaccactccccaccagcatttttagtaatagccattctgactactgtaagatgatatctcattgtggtttcaatttgcatttctctgatgattagtgatgttcatacgctgtttggccattcgtatgtcttcttttgaaaaatgtctatgtatatccctttgcccactttttaatgctattatttgaggggttatgtttagttgtttgagttgcctagaaattctggatgttagtcctctgttgggtgcatagtttgcaaacatttccattcattctgtgggttgtctgttcaccctgctactatttcctttgcttggcagaagctctttcgtttattaagtcccattggtctagttttatttttattgcctgtgcttttgaggtcttagtgatgaattctttgcccagaccaatgcccagaagagtttctctttgggtttccaccggtgattttatagttctggatttacatttaagctgctaattaccttaagttaatttatgtgtatgattacagatacaggtccagttttattcttctgcatatggctatttagttttcccagcaccttttattgaaaaggaaatctttctccagtgtatgttttgttaacgtcgtcaatgattattcactgtagatatgaggctgtatttctgggctctctattctggtctattgatctctgtttctgtgtctataccagcactgtgctatttaagttactatagccttagagcatagtttgaagtcagatagcgtgatgcctccaggtttctacattcacctagaattgctttctctattaggatcttttttggttctgtatgaattttaggattgctttttctaattctgtgaaaactggtgttactattttcatataagaattgcactgaatctgtagattgctttaggcagtatggtcattttaacaatattaattcttatgatccatgagcgtgggattttttttctttttttttttttgtattatctataattgctttcattggtgtcttacacctttcctggtacagatctttcaccaccttggttaaatgtattcctgagtgttttaattttgcgtatctattgtaaacggcattgccttcttgatttggttctcagctagatcattataggtgtagagaaatgctaccggcttttacatattgattttgtattctgaaactttacttagttcatttatcaatcataagaatttttggcagggtctttaggattttctagatttaagatcatagcatcagaaataaaaataattttacttcctcttttctaatttggatttttaattcttcctgttgcccaatagctctgacaaggcttccagtactatgttgataggaagtggtggatgtccgtgtccttgtcttgtgccagttctcagaggagtgcttttaacttttcctgttcagtatgatgttgactctagatatgtcatctatggcttttattattttgaggtatgttctttctatgcctaagtttttgagggttttcatcaggtaaggatgttgaatttcttttcagatgcttttctttatgtctattgagatgatcatatggtttttgttctggattctgctcgttcttctaagtggatgagacatgccagaaaagcatttagtcagccatcttggaaacaagcatctcagatgttttctttctctatagctcattctttcttaccagtgttttcaattttgtacttaattttgtaaagagagtaaatgatataatttccacatatgtttcctctgccaaatcagactcactatgcttcctttccttgtatacataacctacccagcaatacacacaaacatttattgctttggagaattagtttgggaacatttttgaaatgtacaaaaaaatgtatatcttcaaaagaaatttctttttgtggcaaaagacttctgaaggtgctcatgatgatatagggagaagaggggttctggacaggaagaattttatgaaggtgagatggggaaatagctccatttcagagcttctggggagagaggggcctggcccacatggaaaggtctctgatcttacccccaccctccagcccctgttctccagaactatactgtggagagttccatcaggattgttgtggctggtctggtcttcctggctcttttggcaatgctggctaagacctggtggagacatgaggggccacaggtggaaatggaagaaacatgactgaagctggctggagtgaatggcgcgacattctgtctgtgggagattggccagatgggtttcaagtgtgttgtatcagctgtgacttttagtaatgttcttgctaccacaatatccactcgtccatcccgaataattgtgatgaaatattgtccttgggataatattcatttgctaaagacagggatgatacctcaaggtgccactatatacatcgaggggatccacaaaagtccattcagtaaaatgtagttggcatcttagggtaggttgattccacctctaaaaaagtaggtacaacatcaggttgatttttccgaagaaaagtggtgattggccatctttagtctcaatgtaaacggtaatactgatgagtgtggaaaaggcagggaagaggattgacaataagtgacactcattgttttcatctgagctttgagactgaaagaggaacacaggagtgagatgtatgggaacaaaccccttctttttccagctaaacagagtggaagttggacactgagttttggcgtacagcaaaatcctaagtccattgttgggttgaacacggccatgttgtacatcctggtttcacagcagacactggaggaaaacagcctgtattcataagaggctgtccctcgggtcactgcccagaatatccggagttggtgctcacagggttgggaactctcctggaccagacaggctctggatatgggggggtaccaagctccccggggccatgcctccacagctctcttctcacctcattcttgaccatttcccaaacctctgacctcaccttcattcatccatggtgaacacgctaaaactggccttcaaagcttgagacagaggaaaattgggcttcatctctgggaactaaattggggagtggagactcagttctggcctgacaggagggagaagaccctggatcccagtgtggatgggaagaagtatgtgtttctcttttgtgcttggaccctgtgtccaagcatgtctgagatgtgatgaagatgaatcttcctttccttgtctattttctcatgccagagaattggaatcttatattccattaactctttctgttctgttcatccagattctatgaaggagaaaggaaaagatgtgatactgtaattttgctccatttgtctaaaatgagtaggctgcaactcctcttgaagtgataccttttctagctcttgttggaggtgtctcaggactcattacttcggggaacctgcaactgtgtcagtctggggaaactgcaaatattcttgtcttacatttgtctccagccaattgtgatggactccagtgacctgcaattgctgttattgcaggtaaaatgtacctgagtcaggccacagttctcctggactatgagcccctggccatgttcctgaggcaattctgttcatctaaatataataataataacacactaaaaatggcaagccattgttaattcctgaagtctcatttgaaaattactaaatgtctgttattttttggtgtttacattatatgtagacagataaactacacacacacacacacacacacatgcacacagaagaatggattgtttcatgtagaaaagtaaataattcaagatgaaaggatgaaatgtcatggcacctactattctattttagataaagggtctatgaaaagattgatttctttttatgttttatttgttgacatttgaacacaaactatgtaagtgagggagtcgatttgaaagggagaagagcaagttcaaacacattcaggtgaggtcatgctttacatgttttaattgaaatgatccatcttgggagtagatcaataactgagatggtgccaggaatgttaaaaagcttttgtcagtcctaaatattgacaaataaaatttaattaaagtcttagaagaaaacacaaaggaaaacttcacaacatcggatttggcagtgattctttagatgtgacaacaacggcacaggctactacagaaaaaataaacaagttagactttatgaaaattttgaaatattgtgactcaaaagacaacatcagttacttcacatggcaaggaaaaagaacttttaagacgatattatcaaagtaaaaagacaacccacagaatgggagaaaatgttttcaaaccacaccacctgtaagggattaacatccagaatatacagacaactcctaaaactcaatcacaataaactcaattcaaaaatgggcaaagtactgaaacagacatttctccaaagaacatacgcatgaaaagatattcagcatcacgaatcattagggaaatactaactaaaactacaccagatgccatttcataccccttaggatgggtatcatcaaaacaacaacaacaacaacaacaaagtttctatacattaacaacaaactatccaaaaaagtttacaagaaaataagcccatttgcaataactacagaaaacaaaacatgcaggaataaattcacccaaggagtagaaagatctgtatgcaaaagctataaaacattgatgaaaaaactcaagaaataaacaaataaatcgaaagatattccatgttcacggatcagaaggattaatgttgttaaaatgtccattctatccaaagtgattcaatgcaaccattatcaaaaatccaatgacattttttttacagaaatagaaaaaacagtcctaaaattcatgtggaaccacaaaagatctcaaataaccaaagccatctagagggaaaggaacaaagttggaagcatcacattacctaaacacaaactacattacaaaattacagtaattaaaacaacacagtacttgcataaaaacagacacatagaccaatggaagtgattcatagcccaggaaaaaaatgcatgcatttagggtcaaacaatttttgggatgtgtcaagaacacacaatggagaaggaacagtctctttaataaatgggattgggagactgcatgtccacatgcagaagaatggaagtggacatttgcctcacaaaacatacaaagtcaactcaagatagattaatgacttaaatgtaagatgaaagactataatcccagcaatttgggaggccaaggtgggcagatcacctaaggtcaggattccaagaccagcatggccaacatggtgaaatcccgcctctactaaaaatacaaaaacagctgggtgtggttgtgggtgcctgtaatctcagctactcgggaggttgagacaggagaatcacttgaacccaggaggtagaggttgcagtgagccgagatcgcaccactgcactccagccggggcaacacagtgagactccatcttaaaaaaaaaaaaaaaactactaaaagaaatcaagggaaaactccactggcttgggcaaaaccattttggatattaacccaaaggcccaggcaacaaaagcaaaagtagacaaataacattatatcaaattgaaagtttctgcaaagaaaaaaaaaactcaacaagtggaaagacaacctatggaatgggagaatatatttgcacccatacatctaataaggaattaatatccaaaatatataagaaactcaaacaactcaatggtaagaaatcaaataacccaacttaaaaaaatgggcaaagtatctgaataaacatttctaagaataagacaaatcaccaaaaggtatatgaaaaaatgattagcattactaaacatcagctaaataaaaattaaaactagaatgagatatcacctcacacctcttagaatgaccattaacagtctgggcatggtggctcatgcctgtaattcaggcactttgggaggccgaggcagggagattacctgaggtcagcagttcgaaaccagcctggccaatatggtgaaaccccatccctactaaaaatacaaaaattagcagagtttggtggcgcacacttgtagtcccagctactctggagactgaggcaggggaatcgcttgaacccaggaggcagaggttgcagtacaccgagattgtgccactgcactccagcctgggtgacagagcaagactgagtctcaaaaaaaaaaaaaaaaaaaagaccattatcaaaaacataaaaaataacaagggttaacgaggatgtggagaaaagggaacatttgtatgcagttgatgggaatgtaaattagcacaaccattatggaaaacagtctggaagttcctgaaaaaattaaacatagaattcccatatgtgtctgcaatccaactactgcgcatgtatccaaaggaagtggaatcagtatgttgaagagatatctgcattcccatgtttacagccgcattattcataacagccaagatgtggaatcacccttactgcccatctatgggtgcatggacaaagaaaacgtggtatacgataggaacgtaatgaagtactatacaacctttacaacaaagaaggaagtcctctcatttgtgacaatgtgaaaaaacttagaggacattatgttaagggaaacaatccaggcacagaaagacaaatgccacatgatctcatgtgtggagtgtaagaagtggaacctagaggaacagtaaaatggtcgtcgaaagaacctgggatggagagagattgaagagatgttggtcaaaggatgcaaaatttcagttagaagaaatcggttcaagagatctattgtatgtcttggtgactccagttaatagcaacatatggtgtattgaacattactaagagattagattttacatgttctcaccacacacacaaaacatacaagtatgtgaaaaaataaatatgataaagaggttgtttcatccattccacaatgtgtacctatatgaaaacatcatgatggacaccacaaatacccttttcctcattaattaaatttgttttggttttttttttgagatgcagtttcactgttgttgcccaagctgaggtgcaatggcgtgatctccgctcactgcaacctctgcctcccaggttcaagcggttctcctgactcagcctcccaagcagctgggactacagttgcgtaccaccccgtccggctatatttgtgtttctagtagagacagggtttcgccatgttggccaggctggtctcgaactccagacctcaggtgatccacccgcttcgccctcccaaagtgctagatttcaggctgagacaccacacccagcctgtacattgactttctgcccttaaactgtgctgaagtttgtttctcagatgtaggagcctttgggcagagactatggggtttctaggtatagaaattatctcatcttcaaacagaggtaatttgactacctctctctgctactctcttcttacttggatgccttataattctttctctttcctgatggctctgtctaggacttcaagtactatgttgaataggatggtgagagtgggcattcttgtcttgtttcacttatgaagggaacttcttccagcttttactcattcagtatgatgttggttgtgggtttgtcacaggcggctcttattatattgagttatgtttcttcaatgcttagcttgttgagggcttttaacatgaagaaatgcttagtaaaaagtatgttctacatgtgtgttgagaagatcatgtggtttttgtttttagttttgtttaggtgatgaatcacatgtattgattgtgtatgttcaaccaaccttgcaccctaagaataaagttgacttgatcatggtggattcactttttgatatgctgcgggattcagttcttagtattttttgtggatttttgcctctatgttcatcaggaatattggcatgtagttttcttttgtttaatgttcttttctgtctttagtatcagggtgatgccagccttatagaatgagtaaaggccaccctgggcaaacagtgagacccatccctttttaaaaattatgagttttacaaatttaaaatgcatagtgaaaaagttcttacaaactccagaaagataggtgtaaataagagacatttgtaagaatgacagcacattaaatgtgtagatttcaaccttcagttattgcaatattccagtatcaagttggaggatgttatcagtctgatattttttcctcaaatgagagagagaaagaaagacacacaaacaacacagggagaaaaaaagcacacgttacagagagacaaaaagggagacagggaactgtgaatttggactcttgtgtcataagacaaattctagataacacgaccagaccttcaattgacatattgtgtttttgctaataaggtggaattctatgatgcgaaataactatatagtcttttctactgggatttaaatcattttatctgtttctggcttaacaggaaaaatacaaccatggaaaattatgatgatttatttaatacgattgctctatagtgttaataaaacctattaggtattttgcatattacatatcaaggagagtttgaatctcaggtagaaacaaaaaaaaatacatcaaatttcctcatgtgagtgcagaattcaatcgtcccgtgcaggggtaagtgagtctgagatgtgttttgagcctggccgttgcgcatgatgtgaagtgacaagtctagtctgcagttttcagaaaccctcattcctcccttgactgattcaccacttgaacctcatatgacgtagaagaagcctacctatgtccccttcacatgttgtggtcaatgtgtcaactgcacgatccgggcccctcaccacatcctctgcaccggtcagtcgagccgagtcactgcgtcctggcagcagaagctgcaccatgtccatgtcacccacggtcatcatcctggcatgtcttggtgagtcctggaagggaaggagcaccagggttacactatgggcctgcagattgggtgtctccccagcagagagccatgttctgaagcaagtgagtggtgaggatgagttaattttcagtccagcgtggcgcccagtggctcaggaggaaagggtaggttgctgccgagatgaatagttcatcatgatctttctttgcagggttcttcttggaccagagtgtgtgggcacacgtgggtgagtccttccccaaatgatgggttgccatcttcaccccaatacaagtgaattttccagaaatgggagggaggcagcacagagggtgggctgatgggctgaccatgggaaggcctggggggagtctctcatgaactagtaagaggagatcctgggagtctctcatgaactagtaagaggagatcctgggagtctctcatgaactagtaagaggagatcctggtatgctcagccctctgttttgtcttagccctccccagcctttcttccccatggctgagttgagctctgtgtggcccaggcgggatactgaggtgctcaaagctggggtgtgtggggggatgtggtgtcaccgacagaggagggaagggtagcagtgttaggaacagcaggtcctctgaggacaagagggtaactcacaccctccagcgtttccatgacggtaggggctgcagtgtggctgctgtcattctgccagaagaggtgggggaaccacagccacgaccctgccattccaaatcctctgatggagctcagttgtttattgtggttcaggcattagctaatattccattcacaaaggtcataccctccaccccatgtctactttgtgttctttggtgtaactaatcttgcagtattaaaatctagtaagagtcccttactcagcacctgctcagttctcaactgacacttttgttgtagggagacgccacgtctatgcgggatgggtccttcctgtagccccaggcacccaggtgtggtaggagccttagaaagaagaaatggggagaatcttctgagcacagggagggaggggcagctcaacatactcctctctgaggcggcatctccttctccccaaggtggtcaggacaagcccttctgctctgcctggcccagcgctgtggtgcctcaaggaggacacgtgactcttcggtgtcactatcgtcgtgggtttaacatcttcacgctgtacaagaaagatggggtccctgtccctgagctctacaacagaatattctggaacagtttcctcattagccctgtgaccccagcacacgcagggacctacagatgtcgaggttttcacccgcactcccccactgagtggtcggcacccagcaaccccctggtgatcatggtcacaggtcagagggctcctgtctgggcttctccttgtcccacctcctgagtcccagagcttctggtgggggtgtccaccagagtccgatcatccaggccccaactatatttggggtaaagggggattgaatacaggggaatgggtgctgtgttggaaagaataactgtccccatcgatggccacattgtaatccttggagcctgtgactatgttatagggcaggggactgaaggggaagatggagctcaggttgttgatgagttgaccttgagatggggagatggcctggactctcccactgggctcagtgtaatcacaagggtccatatgagtggagaaggaagaggagaatggggattagagcagcatcgtgggatactccaccagccactgtgggctttgaaggtggaggaagaccacgagccacgaaggggctggagaaatcaatggaactgattctcccgagtctccagagggaatgcagccctgcagatgccttgattgtagcccaggaagaacagggtctgatttctgtctccagaagtggaaggggtcagtgtgttctctcctgccgccatgtttgtgataattttctccagcaacaacaggaaaccaacacaggaacccaggtgaaggacaagttaaaaaaccaaacaagaaggttggctaccctgagatcagcaagggtgcactgctgatgccaccaccaggctggaaccacatagggagggatcgacaggaagagttgggggtggagggtgagagagagagagagagcactaggccatagagcagggcagtgagttctcagctcaggtgggaggggagctgtgacaaggaagaacctccctgaggaaactgcctcttctccttccaggtctatatgagaaaccttcgcttacagcccggccgggccccacggttcgcgcaggagagaacgtgaccttgtcctgcagctcccagagctcctttgacatctaccatctatccagggagggggaagcccatgaacttaggctccctgcagtgcccagcatcaatggaacattccaggccgacttccctctgggtcctgccacccacggagagacctacagatgcttcggctctttccatggatctccctacgagtggtcagacccgagtgacccactgcctgtttctgtcacaggtgaggaaagccaatgtctgtcccatgtcctatggtcctagagccttagctgaggagcttcctgctgatgatggagagaagcatggacagatgtggagagaagatgcagcatggtgtgagggtgggatcagggcacaggatggcagacagggcacctccaaaccctcctgcatggcctgcatggaagcttgcagtaagggctccgggtacccaggcagatggagaaagtggtcaggacagacccagaggagggagactgggctcagtttggggagatcagaggttccctcagcccctcaaccttacccatttcccagaagcccaccctggcctctcacctacacagagatgtcatcaccagcaacccctacactttttcttttcctttgaaaaaatgctgattgaggttaaatatacctatataatttatcaactttaccatttttaagtgtaaaatctagggatcataaatacctttatatgctgtgtgcggtggctcatgcctgtaatctcagcattttgagacgccaaggcaggtggatcatttaaaatcaggggctggagaccagcctggccaacatgggggaaccaatctttactaaaaagacaaaaaaaataaaattagccaggcatggtgccaggcgcctataatcccagcaacttgggaggctgaggcgggagagtggcttaaacccaggaggaggaggttgcagtgagctgagatcatgccactgcactgcagcctggtgacacagagagactctgtctctaaataaataaataaatacttttatattcttcttttgttaccctccaccccttccttcctaacctctggtatccaccattctactctctaccttcatgaggtccaccttttacatcctgcatgtgagtaagaaatggcaatccttgtaatgacctccagtccatccatgtggctgcaaatgacaggacgttactctttgtatggatgagttgtctccattgtgtgtatgtactactttctctctatccattcatccactgatgggcaggtaggttgactccacatcttggctactgtgaacagtgctggaacagtcatgggagtgcagatgtcacttcaatacactgaagtccttttctttgcatttacacccactagtggaattgctagatcctctggatgttctctttttaggttttgttttatgctttttgtttttttgacatagcgtttcactcttgttgcccaagctggagtgcaatggcaccacctgggctcactgcaacctctacctccaggattcaagtgattctccagcctc[134 bp omitted]cagcctcccaaggtgctgggattacaagcgtgagacacagtgcctaatctctttttagtttttaaggaacttccatattcttctcctctgtaatggctgtattaatttacattcctatcaacagtgtattagggttctcctttctccaccaccttgccaacatttgttttgtctgtctctgagataaaacccattgtaatggggtgagatgatagctcattgtgacttcatttgcatttctctgatgattagtgatactgagcactttttcatatatgcaatgtatatatgttcatttgtatgttttgttcattgagaaatgtctgttcaggtcttttactaattttataattaaattattagttttattgaggtgtttgagcttcttttatattctagttattaatcccatctcagatgcatagtttgcaaatatttgctcccattctgtgggttgtctcttcttcacttcattggttgcttcctttgcggtgcagaagctgcttgatttgatataatcccaatggtctatttttttgttgttgttgtgattacttgtgtttttgaggttttaaacaaaatgtcttccctcagacaaatgtcctggagcatttctccagtgtttccttttagacatttaatggattcaggtcttaagtcattaatccattttcatctgatttttgtgtatggtgagaggtagaggtgcagtttcatccctctgcatgtagatatccagttttccctgcaccatttattgaaatgactgtcctttccagattgtagattcttcgaacctttgtcaaagtccattggatgtaaatgggtggattacatccgtgttcttcattctgctccattgttttatgtgcttttctttatgccaatgtcatgttgttttgcttactacagctctgtaacatatttttaagtcaggtagtgtgatgctcctgttttctccttataccttgaagtctcaagatagttggtgtcacctacaatgattatggagaatgggatgccaggactcccagggcccaacattagataatagaatgttggccatgaaccaacctcaaagatttccattgagtagaagacaggcatcctcattgccacacctctctcctgtcccgtgttctaggaaacccttctagtagttggccttcacccactgaaccaagcttcaaaactggtaagtgaaggacccctcttatctctgcttttggaaacctggggaggtagaagccttggattcaagcgttggctcagcacctgccagctctgtgattgtgggcctgtcttccattgtctctgaaccccagacactccaacagcgaaagggatctgggcccagcacagggctcagtgaaatctcttaatctctaattttctgctgctgagacctcagggtagaaggatgagtgcaaatcagacattcttctcaggaaaaatgctgtgtttgttctgcctgcattcctaactgggaggacaaatgcctgggggcttgagaaggggaaggaaggggaacatttttgagggtggtgtatttgtagagaagttctacttgccaaggaatgagctcctgtctgtcatgatccaaccctggttgacttagtggaacaagagctttgcggtaagagagaacgtagttcatccgtgcacatgacacttccacttactcgttcagccactgccccatgctcagactgtgcagtgtggaaccttttcctatgttgccataacaaatttccacaagcttcgtggatggaaaccacatttttaaaaaatatctcatggtgctgtagctcagaagtatgaaatgcatcatctcactgggctaaaatcaaggtgacagcaaggctgccttccctctgaatgttccaggcaagaatctgcttcctcacttttcccagctcctagaggctcccacattccttggctcctggtccccgtcttcctccctcaaagtccacaaaggctggtcacgcctctcacacggcatcactcagacccttcttccttgtccacacctctttctctgaatgctgctctgccttcttcctcatcttttaaggactttggcattctattggaaacaccaagataatccatcataatttccctaaaatcatctaggataccctccttttaaggttagctgattagcaaccgtaattccatctgcaatctgcattccttttttccatgtaaaataacatattcacaagatatggcgactaggacaggaatattttggggtggggcggcattcttatcctttccacaaatggtaaacaaggtgcatttggcctctgctcttggacactgatattgcaaaggattaaatgggagggcagaaaatgaatgcaccagtggaccaataaatgaatgatccattgggaagcatctgtgcatgagaatgattgattgattggttgtttttatgagacagtgtctccctctgtgccccaggctggagtgcagtggcgggatctcggctcaccgcaacctccacctcccaggttaaagcgattctctacactcagcttcccgagaggctgggattacacccatgtcccaccacgcctggctaatttttttttggtatttttttttagtacagacaaggttttaccatgttgcccaggctatctcaaactcccaaccttaagggatccgcccgtctcagcctcccaaagtgctgagattagaggcgtgagccaaggcgccgagccgtattttaaaagaaataatagataatgctgagtgtataatttcgggtgacagagaagttctcactgatcaaataatacttgtgaccttaatgaaaaaaatagatcaacccctggaagattggcggaaggattttccacacagctgtcagccgtgaaggcacaaaggtgaaaacaatgttatgtggaaggaagaggctctgcctgaaatgctgggaatgacatggggagaatgacaagacgactgtggagagacagagagcacactgggtacacaggaaactaaggagcaacaaggagcgtgtgtttgatactcacagccattggacttacctcggggctaactgggaatccctacatgatgaatagtgactgacatgaaaataagggaggcccaggtgcataactggaatctaggagactgtggaaaaggcaattcccgcccccctggtgaaatgtggtgctgatttagacactaaatgaatgaaagatggacacaagatgtgtttgtgaggtagagtaatttgcagggagggcttgcctggtttgatttttcctaattgtttaatcttcacttcattgatttctttctgagatttatttttcctacatgtaaatcaatacttggcagaggagtgagagatacatgaggggtggtgcaaaggaagagacctattataatataacacacaaggttctgaacggtggctcacacctgtaacccaacattttgggaggctgaggaggctggatcaagtgagatcaggagttcgagatcagcctggacaacatggtgaaaccccatctctactaaatatacaaaaactagctgggggtggtggcgcgtgcctgtaataccagctattcgggaagttgaagaaggagaatggcttcaaccagggagggagaggttacagtgagccaagatcgcgtcattgcactgcaccctaggtgacagagtgagactccatggcaaaaaataaaaataaagaatacataaatataatataacatacacgaatgacaaaggcacaccaattccaatcatcatttttctatttctctataatgacttctttgatcctttatcctatccgtaagaaaatcaggcgaaaacatcttccttatttggctttctgtgagcatgagatcatatggaaaatgtgaaacccaccagcacaggtcctggaatagagaacgtgatctgttcatggcacaaaacttgccccttcacccaaatcccccacctcacccctacttccaatcacattaatgatacagatagatcatggggaggtaaaaactaatattctttggagttcagatcgtagactcagagaccagtgccagcactatctcctggtcaccttttggagtaattcacagaaagacaggctgtattgaagcaacagatgatggagggggtggtctttcccccagactctcgggtggaacagcagcctaatatctgactcccaagatgacaaaagtagcatgttgcccacgagcttcatcattatttcctggctgtttgatataagacagctcaacctcacttatgttgatttcaatgtcactgttttttccttttcttggagaatgtaatttgtttgagtcaagagggttgtggatgtagaaactgtaaagcacattcactgtgtatcaatcccagtccagtcttcccagagaagactctaaacacctcccatactgcacctggggctgtgccaatttctatcactcaccatcactccagggagacagaacacacagggaatacattacataggcaggttcattacttatagataagcagcgagtgacaacagaaaccttcctttcagggtgagccagtccctcaaggctcagaaaaactgctcaggacacatggagtcacttcatgtgcactgtagctgggggaagccagaaagcagcccagcctgggttttgtaccctggagccacagggaacactcagctaaagcactgcatgatgttctcctccaggaagaacaggaagacagcccaggctgttctgagacgttcctcctgatctcaggatgttgctgtcttagcctatttttgttgctataaaagaacacttgagcctgggtatcttctaaagaaaagagatgtgtttggctcactgatctgcacgctgtactagaagcaggacactaccatctatttctggctgcggcctcaggctgctcccacactgacagaagagaagggggtcctgcgtgtgcagagaccacagagatcacatggcaagagagggagaaagggggtgtgatggagcttccaagctctttttaagaatcaactctccagggtactaatagagggagaacttgctaaccccgtcctctggggacagcattaatctattcatgatggatccacccccatgaccaaaacacccctcccaataggcacaactcccacactggggattaaatttcaaagtggggtttggaggggtcaaacattgaaacaatagcagttgtatcatcagcacattctattgttattatgaaaactataacggagaaagcaggagaaagctgggtctcccgcctcgtgggtgcttgtcttaaagaggtgttttatgtggttgcctggcaaccaagaaatgagagacaatccacaaagaggaactgctatggttagcttcttattggattcccatcttcctccaggtatcgccagacacctgcatgctgtgattaggtactcagtggccatcatcctctttaccatccttcccttctttctccttcatcgctggtgctccaaaaaaaaagtaagcctcacgaagcagaggccagagaactcagggccctgtgcggaagcaggatgggagcacgcaggtgtgtgttcctcactggcaggaaagtctctggcccaaggcaggagccagaggcagagctttctagagagagcaccagacaccctgcccctgccttcagctcacagaccgttgcctgattgtgaactgtatcctcacgtcccctgcagccactcacatccaggagaagattccatgacaggcagaaagtgggagatagaatcaatgggatgggaactgacagctattcatggaatggggtcttgcactcagagagatggaatgtctgagtctggctgttggcagctgagggacctcaggcacctatggcctccccctgtgtgttggtatctgttcatgaaatgaggacccagaagtgccctcccagctgttttgattgcttccgtctcctacagatgctgctgtaatgaaccaagagcctgcgggacacagaacagtgaacagggaggtaggtcctcctagcccagcctcatggatacagtcttattccgaaatagtcctgaaaaatgtgaacaccctccctcactcaggatttccctctctccaggactctgatgaacaagaccctcaggaggtgacatacgcacagttggatcactgcattttcacacagagaaaaatcactggcccttctcagaggagcaagagaccctcaacagataccagcgtgtgtatagaacttccaaatgctgagcccagagcgttgtctcctgcccatgagcaccacagtcaggccttgatgggatcttctagggagacaacagccctgtctcaaacccagcttgccagctctaatgtaccagcagctggaatctgaaggcgtgagtctccatcttagagcatcactcttcctcacaccacaaatctggtgcctgtctcttgcttaccaatgtctaaggtccccactgcctgctgcagagaaaacacactcctttgcttagcccacaattctctatttcacttgacccctgcccacctctccaacctaactggcttacttcctagtctacttgaggctgcaatcacactgaggaactcacaattccaaacatacaagaggctctctcttaacacggcacttagacacgtgctgttccaccttccctcgtgctgttccacctttcctcagactatttttcagccttctggcatcagcaaaccttataaaatttttttgatttcagtgtagttctctcctcttcaaataaacatgtctgccttcattctttaggtgactctttttttggctgaaagtttccagtgttatcattaccatgtccaaataactccaactgttctccactgggttctcacccctggacttggagcttctggaagcagggtggagcctgatttgtctctgagactccaatttccatccaaagatgcagcacataagaggttccaaggatcgtgaatcacatgaacaagtgatattcttactctctgcagacctggaaagctggcagagtcattccatgatgaaacatttgtagagtcataggccttgttagtctcatctccacggggacacatatcaacacatcatctttcatactataaatatacagtcggtcctctgtatctgtgggatttacaggtgtttattgaaccaaatataaatcaaaaatattcagagaaaaaatccacaaagtttcaaaaagcaaaactatgttgaatggacacaaatgaagctgtgtgtaggctgtatcaggaattataaataatcaagggatgatttcatgtacacaggaggatgtgcatgggttatttgcaaatgctgtgccatttcatgtaagaggcttgagcgtctgcagattgtgctatctgagtggagatcctgaaaccaatcacccacgaatagtgagggatgactgtatataatttttatttctcaattttaaatataaaacataaaaaaattacaataacaagataaaataaacaagtgttttatagtgtgagaatacgtttagatatatttttctctatgtgtaacccttgggcccatgttatttattgagaagacattctattccaccttaaaccacatggcagcctttgtcaactataaagggactgtgtgtacacggatgtattttagacactgttttctgctcagtggctctctctctgtccactctcttgagaatgctgcattttatgcagccttatacaacccctaaaatttggtagctggagtcctctagttatttattataggctatttgctatgctttttttatttttcttgaggcagagtctcgctctgttgcccaggctggagtgcagtggcacgatctcggctcactgcaacttccgcctcccaggttcaagggattccgtgcctcagcctcttgaatagctggcattacaagtgcctgctaccaggcatggctaatttttgtatttttagcagagacatggtttcactatattggccaggctggtctcaaactcctgacctcggttgatcactcacctcggcttccaaagtgctggggaaattgattttctatagcattatgttactggatatttctgtaaaatttaaaatgagggaggcagagagacagagagagagcaaaccatgagttggaactctggaatcttgggacatgagacaaattctagataaatctacaaaaatccagaatttacatgttgtgatttttgctgataaagtacaattctaagattgtaaataattgcataatccttccctgggagtttaaatcatttgaactggttctgctgtaatactagaaatacaatcatgaaaaattctaatggtttattgtcacaattgctctgaaaaccttaataatacctattagatattttgcatattacacaggaagaagagtttgaatctcagataaaaacaataaaaatacatgaaaagtctttcatgttagcacagattttaggcatctcgtgttcgggaggttggatctgagacgtgttttgagttggtcatagtgaaggacgcgaggtgtcaattctagtgagagcaatttccaggaagccatgttccgctcttgagcgagcacccactgggcctcatgcaaggtagaaagagcctgcgtacgtcaccctcccatgatgtggtcaacatgtaaactgcatgggcagggcgccaaataacatcctgtgcgctgctgagctgagctggggcgcagccgcctgtctgcaccggcagcaccatgtcgctcatggtcgtcagcatggcgtgtgttggtgagtcctggaagggaatcgagggagggagtgcggggatggagatctggacctggaggtaaagatatgggcctagaggtggagttatgggcctagaggtggagttatgggcctgaagtggagatctgggcctggagtggagatctgggcctggagtggagataggggcctggggtggagatatgtgcctggagtggagatctgggcctggagtggagatatgggcctggggtggagatatgtgcctggggtggagagatgggcctggaggggagatatgggcctggaggggagatgtgggcctagaggtggagtgatgggcctagaagtggagcgatgggcctggagtggagatatgggcctggaggtggagttatgggcctgcagtagagatatgggcctgaagtggagatatgggcctggagtggagatatgggcctagaggtggagttatgggcccggaggtggagttaagggcatgaagtggagatctgggcctggagtggagatatgatcctggagtggagatatgggcctggggtggagatacgggcctggagcagacatacaagcctggaaaggagatatgggcctggagaggagatagaagcctggagtggaaatatgggcctggagtggagatatgagcctggagtggatatatgagcctggagttgagataggagcctggagtggagatatgggcctggagtggacttaccagcctggagaggagatatgggcctggagtggagatacggacctggagtggagatctgggcctgttgtgtagatctaggcctggaggtagagatctgggcctggaggctcagtctctgcacagccgagatccttgttcctgggggcaggtaggcagcgagggtgagtttaccttcagcccagcaagggcctggctgccaagacgcacagcccagtgggggcagcagggtgccctggtttgcctgcagagggatggtccatcatgatctttctttctagggttgttcttggtccagagggccggtccacacatgggtgagtccttccccaaaccttagggtgtcatctccccacataagaggattttcctgaaatgggagggaagtcctgtcggggagtctctcatacactaggaagaggggaccctcggatgctcggcccacatttctgaccttgccttccccggcctttcattccctttcctgagtcaagctctgtgaagactggggtgagactagggtgctccaagatgggtgtgcagggaggaagtggtgtcagcagcagagaaagagagggaagcagtgctaggaacagcaggtcctctgaggacaaaggtgtaactcacaccctccagcgtttccgtgatggtaggggctgcagtgtggctgcggtctttctaccagaaaaggtgaggaaaccacagccatggccctgacattccaaatcctctgatgggggctcagttcatcaattggctgatattccattcacataggacttgccctccatgccgtgtctactttgtgttgttttatatgagtaattttgcagtattaaaatctagtaagagttgcttctccagcaacttgctcaaagttctcagctgacacttgttgtagggagacgccaagtctatgcaggatgggtccttcctgtagccctgggcacccaggtgtggtaggagccttagaaagtggaaatggggagaatcttctgggcactgggagtgaggggcggctccacatcctcctctctaaggcagtgcctccttctcccccaggtggtcaggacaaacccttcctgtctgcctggcccagcgctgtggtgcctcgaggaggacacgtgactcttcggtgtcactatcgtcataggtttaacaatttcatgctatacaaagaagacagaatccacattcccatcttccatggcagaatattccaggagagcttcaacatgagccctgtgaccacagcacatgcagggaactacacatgtcggggttcacacccacactcccccactgggtggtcggcacccagcaaccccgtggtgatcatggtcacaggtcagaggctttccgtctgggcttctcactgtcccacctcctgaatcccagagcttctggtgggggtgtccgtcagggtcccatcacccaggccctgactgtatttggggtcaagggagattgaatacaggggaaatgggtgctgtggtgggaagaatcactgtccccaatgatggctacattgtaatccctggagcctgtgactatttatgttacagggcaggggactgaaggggaaggtggagctcaggttgttgatgagttgaccttgagatggggagacagcctggactgtcccactgggctcagtgtaatcacaagggtccacatgagaggtggaggaagaggggagtggggattagagcagtgtagtgggagggagacgctatcagccactgcgggctttgaaggtggaggaagaccactagtcacagaatgcaggtggcctctaagggctggagaagtcaagagaactgattcgctgattctccagagggaacgcagccctgtagacaccttgatttcagcacagggagaactggatccaatttctgtctccagaagtggaaggggtcagtgtgttctctcccgctgccatgtttgtggtaattttctgcagcagcaacaggaaaccaacacaggaacccaggtcaaggacaagttaggaaaccaaacaaggatagccagatgtggtggtgggcacgagtaatccaacgactggggaggctgaggcaagagaatcacttgaactggggatttgttcaaaagagattgattcaggctgctaagagcctggacatgcagcctgtcctcttccacccccacatagacagcaggaaagagattagtgggaaacagatacaacagcccaagagatgaggctgtcttcacagtggcaagggagtcaggggctactggagacagagggacagagaagagggaggaagacagatggaggcacctgcaccaggggatatgggcacagaaaagacacggagatgcagagagggaggagagagacagacacggggaggggaaccctcactcattccaggtgccatggatgggatgataaagagagatgccttctaaactcacaacttctctttctaggaaaccacagaaaaccttccctcctggcccacccaggtcccctggtgaaatcaggagagagagtcatcctgcaatgttggtcagatatcatgtttgagcacttctttctgcacaaagaggggatctctaaggacccctcacgcctcgttggacagatccatgatggggtctccaaggccaatttctccatcggtcccatgatgcttgcccttgcagggacctacagatgctacggttctgttactcacaccccctatcagttgtcagctcccagtgatcccctggacatcgtggtcacaggtgagagtgtctagacattgttctcattgtcactgggacacagagtgaatgatccaggacttggaacccccaggtggtcatgaggaagataagtgtgggattcttatggaaagagagtgacttggtgaggtctgtaccaacagagacagagaaacaggagacataagtacagaacaggtgtcataacagaggacagacacaggggccatacagggaggtagaaaagagagaaagaggtaaaggagacactcagacagacagacatgtcccagagagaggtgtccttccatgctgactttgctcagagacctggcacaggttagaagtttcatttctgttttacctccacaaagtgttcctaccagaagaacccaaggacacccatatttctgacctgagttgggccctgtggcctcaggccttgtgccacctacagatgccgtgtttattctgacacctctgccttccatgcaatggagagtaatcatcccaggatatcatggcccctgaacaccaacccctgtatgctgtgtgaacttggggtccccagactggattctgaggctcatattccaaataatcccacatatgataggatcgctgagagacacagagaaaaatcagggacaccaaaaagcaaagacataaacacacacaaaatgagccagaagaaggagattaagagattcacagacacataaaaagaaagaaaagagggcagaatggagagaatgatggaaaggaggagagaaaagccccaaaatcagaaccctgagggagggacacaaagacagagaaagataaatatgtggggatggattgcagagattccaaatagaactagagagactgagaggcagagaaagacaaggagacggagagagagagatgatagatggatagatagacgtagatagatgataaataggtagatgatagataatggattggttatagatacatagatgatgactgatagatgatacatagagatgacgatgatgatgatagacacatagatatatacatagatgatacataaatagagacagagaggcagacagagaggtaatagagagagagatagatgatacatatatagataatagatgattgatggatagatagacagacagacaattgatagagagatagataagtgatacataaatatagatgatagataatttgtagatagacacaaaatagataaatagatagaaatgtgcagaaagttatgaacaagacagaaagtgagagactcaaaattaaagaaaaaggaagatcaagtcaaccaatccaaggagggtcagagagaataaaacaatccaaaaagggaaaacatacctcagggtggggaagtgaggtcatagacctagagagacagaaaaggtagaaggaggaaacagatatgaagagagatggggtggagggtgagagagagagagagagcattaggtcatagagcaggggagtgagttctcagctcaggtatgaggggagctatgacaaggaagaacctccctgaggaaactgcctcttctccttccaggtccatatgagaaaccttctctctcagcccagccgggccccaaggttcaggcaggagagagcgtgaccttgtcctgtagctcccggagctcctatgacatgtaccatctatccagggaggggggagcccatgaacgtaggctccctgcagtgcgcaaggtcaacagaacattccaggcagatttccctctgggccctgccacccacggagggacctacagatgcttcggctctttccgtcactctccctacgagtggtcagacccgagtgacccactgcttgtttctgtcacaggtgagaaaagcccatatctctctcatgtcctatgatcctaaatccttagctaaggagcttcctgctgatgatggagaaaagcatggacagatgcagagagaagacacagcaggtgtgagggcggagtcagggcgcaggatggcagacagggcacctccaaaccctccttcatggcctgcatggaggcctccgatcagggctccaggcacccaggcagatggagaaagcggtcaggacagacccagagaaggggagactgggcttagtttggggagatcagaggttccctcagcccctcaatcttatccatttcccagaagcccatcatggcctctcacccacacagagagatatcatcaccagcaacccctacacccttttcttttcattttcaaaaatatttattgaggttaaatgtaactatataatttaccacctttaccatttttaaaagtaaaatctagtggtcataaatacctttatatgctgggtgtggtggttcacggttgtaatctcggcgctttgagaggccaaggaaggtggatcatttaagatcaggaactcgagatcaccctggccaacatgtgggaaattcatctttactaaacagacaagaaaaattagccgagcatgctggcatgcacctgtagtcctagctacttgggaggctgaggcaggagaagcacttaaacccaggaggcagaggttgcactgagccgagatcatgccactgcactgcagcctgggagacagagagagactctgtttctaaataaataaatacatctatattcttttttttgttaccctccacccttcccttcctggcctctggtgtccaccattgtattctccaccttcatgagatccaccttttatctcctgcatgtgggtgagaaatgggaatctttgtaatgacctccagttccatccatgtggctgcaaatgacaggatgttattgtttctatggatgagtagtctccactgtgtgtgtgtaccacagttctctatccattcacccactgatgggcaggtaggttgactccacatcttggctactgtgaacagtgctggaacagtcatatgagtgcagatatcacttcgatacactgatgtcctttcctttggatataaacccagtagtgaaattgctggacactatgaaagttctctttttttttttttcttttttgagaaagagtttccctccttagtccaagctggagtctaagtggtgagatcttggctcattgcaacctgtgcctcctaggttcaaatgattgtcctgactcagcctccctagtagctgtgattacaggtgcacgccaccatgcctggctaatttttgtatttttttagcacagacgggatatcccaattttgggcaggctgctctcaaactcctgacctcaagtgaggtgcctgcctcggtttcccaaagtgctgaagttacaggcataagccactatgcccagcctccttttagttttttaaagaatttccatacttttctccataatagttgtactaatttacattcctaccaacagggtaccagggttctcctttctctaccatcttgccagcatttgttttgcctgtcttgcagtaaaagccattttactttactttattttatttatttatttatgttgagatggagtttcactcatagtctcccaggctggagtgcaagggtgtgatctcagctcactgcaacctccgcctcccgcgttcaactgattctcctgcctcagcctccaaagtagctgggattacaggcatgtgccaccacgcctagctaatttttgtatgtttagtagagagggagtttctccatgatggtcaggctggtctcccgacctcaggtgatccgcccacctccgcctcctgaagtgccggaattacaggcgtgagccaccggcctaaaaggcattttaatgggatgagatgaaaactcatcgcgattgtaatttacatttctctgatgatgagtgatgccgagtactttttcatatacgtgatcgccatttctatgttttgtttgtggagaaatgtctcctcatgtcttttgctcgttttttaattaaattgttttattgagttgtttgagcttcttatatttccagttattaatcccgtctcagatgaatagtttgcaaatatttgctcctattttgtcggttgtctcttcactttcttggtttatcttttgtggtgcagaagttgcttggtttgatgtaatcctaatggtctattttttgctttgattacttgtgttttgaaggttttaaacaaaatgtctttcgtcagacaaatgtcttccccattattttcttctacatgtttcataggttcaggccttagactcatgtttttaatccattttcatttgatttttgtgtatggtgacaggtatagatgcagttttattcctctgcatgtagatatccagttttccccacaccatttattgaaaagactgtcctttcctgattgtaagttctcggcacct[134 bp omitted]tctactaaaaatacaaaaattagctgagcatggtgaccagtgcctgtaataccactactcgggtgtttgaggcaagagaattgcttgaatccaggaagtggaggttgcattgagctgagattgcacctctgcactccagcctgcatgacagagcaagattctatcacacacacacacaaaaaaagccattggatgtaaatgcatggattatatctgtgttctccattctgtttcattttttatgtgcctttctttatgccaatgtcatgctgttttgcttactacagctctgtaacatatttctaagtcaggtagtgtgatgctcctgttttctctttataccttcaagtctcaagacagtgggcatcgcacacaaaaattatggagaagaggatcccaagactcccagggtccaacattagataacagagtgttggccatgaaccaacctcaaagatttccattgagtagaggacaagcaccctcatttcctcacatctctcctgtcccatgttctaggaaacccttcaagtagttggccttcacccacagaaccaagctccaaatctggtgagtaaaggacccctcttatctctgcttttggaaacctggggaggtggaagccttggatgcaagtgttggctcaaacctcccagctctgtgaatgagggcctgtcttccaccatctctgaactccagacactccaacagtgaaagggatctagggccaccaaagggctcagcgaagtctcttaacctttaatgtcctgcaggtgagacctcctacaagctagaagaatgattgccaatctgacatccttctcaggaaacatgcagtgttttttcttcctgcattcctaactggaggataaattcctggggacttgagagagggaagggaagggaacatctgatgagggcgaggtgttttagagaagttccacttgccaaggaatgaattactgttggtcatgaagcaaccctggctgactcagcagagcaagagccttgccgtaacagagaacagagctcatgcacgcacacttcgactcactgactcattcagccacggccccatgctcaggctgtgcagttggaatcctttcctattgttgccataacaaatttccacaagattcgtgggtgaaaacaaaacggttttttaattatcttacagtgctgtagctcaaagtaggaagtgcatcttactgggctaaaatcaaggtgacagcaaggctgccttccctctgaggattccaggcaagaatctgcttctcacttgtcccagcttctaaaggctcccagttccttggctcctggtccccttcctccttcctcaaagcccacaaagactggtcacatctcacatggcatcactcagacccttcttccttaccacacctctttctctgaatgctgctctcccttcttccttatcttttgaaaacttggggattctattgggttcaccaagatgaaaatccatcataatctcccggaaatcattcaggatacccttgttttaagttcagctgactagcaaccgtaattccatctgcaatcttcattccttctttccatgtaaaataagatattcacaagctatggaggccaggacagggacattttggggtgggacagcattctcctgccttccacgaacggtgaacaagatgcatttggcctctgctcttgggacactgatattgcagatggttaaatgggaggacagaaaatgagtgcacaagtggaccaataaatgaatgatccattgggaagcatctgtgcatgaaatctatttgtttgttcgttcatttatttattgagacagagtctccctctgtcttccaggctacagtgcagtgtcacgatcttggctcactgcaacctgcgtctcctggatccaagtgattctcctgcctcaccctctcgagtagctgggattacaggcaactgccaccatgcccggctaattctttttgtatattttttgtagagaggatgtttcaccatgttggccaagcttgtctgaaactcccaacctcaagtgatccgaccatctcagcaacccaaagtactgggattacaggcgtgagccactttgcccagccagaattcaaaataaataatagataatgctgagtgtataattttgggtgacagagaaggtctcactaatcagatatttgtgacattaatgaaaaacacggattgaacccctgaaagattggcggaaggattttccacacacagctgtcagccgtgaaggcagaaagctgaaaacaatctgatgtggaaggaagaggctctgcctgaaatgctgggaatgaggtggggagaatgacaagacgactgtggagagacggagagcacactgggtacacaggaaactaaggagcaacaaggagtgtgtgtttgacactcacagccattggattcacctcggggtagccaggaatccctacatgattaatagtgactgacatgaaaataagggaggcccaggtgcgtaactggaatctaggagacagtggaaaaggcaattgccgccccactggtgaaatgtggtgctgatttagaccctaagtggatgaagcagatggatataagctatgtttgggaggtagaatcatttgcagggagggcttgctgggtttgagtttcctagttgtttaatccttgctaaattaatttctttctgagatttattcctcctacacataaatcaatacctggcaaaggagtgacagatatatgaggggtggtggaaatgaagggacctattatagcatagtatacaagtctgtgaacggtggctcactcctgtaacccagcactgcaggaggctaaggccagtggattccaagaagtcaggagttcgagaccagcctggccaacatggagaaaccctatctctacatggtgaaaccctatctctcctaaaaatacaaaaattagccgagcatggtggtgcatccctgtaatcccagctcctgctctggaggatgaagcaggagaatgacttcaacccaggaggtggaggttgcagtgagtggagatcgcatcactgcactccagcctgggtgacacaaggagactccatctcaaaaaataaaaataagaaatgcataaatataataaaacacacacgaatgacaaaggcacctgaattcccatcatcatttttctatttctctataattacttctttgatcctttatcttatccattaggcaatcagcctaaaacctcttccgtatttggctttctgtgagcatgagatcatatagaaaatgtgaaagcccgctgaatcctccagcacaaatcctggaatagagaaagtgctctggtcatcacaaaaaaaacttgccccctcacccaaatcccccatctcacccctacttccaatcacctgtggaaatacagatagatcatggggaggtaaatgctaatactccttggagtgagtccagatcttggaatcagagatcagtgccagcactagctcctgctcccctttcctactaattcacaggaggacaggtggtattgaagcaatagatagtcgagggggtggtccttcccccagcctctgaggtagaacagcagcctaacatgtgtctcccgagatcacaaagagtagcacatttcacacgggcttcaacactattttctggctgtttgacataagagaattctacttcgctttttttatattgatttcacttttgtttccttttcttggagaatgcaagttgtttaactcaagaatgccgtggatgtagaaatcctaaagcacattcgctgtgtatcaatcccagtccagtcttcccagagaagactctaaacacctcctggactgcacctgggcctatgccaattcctatcactcaccgtcactccagggagacagaacacacagagaatacgttacataggcaggttcattactaacagataagcagcgagtgacaacagaagcctacatttcaatgtgagccagttccccaaggctcagaaaagctgctcgagacatgtggagtcaccccatttgcagtgtagctgggggaagccagaaagcagcccagcctgggttttgtaccctggagccacaggaagcactcagctaaagcactgcatgacgtcctcctccaggaagaacaggaagacagcccaggctgttctgggacaatcctcctgatctcaggactttgctgtcttagtccatttttgttgctctaaaggaacacttgagcctgggtaacttctaaagaagagattggtttgcctcaccgttctgcaggctgtactggaagcatggcaccagcatctatttcttatgatggcctcaggccgctcccactctggcagaagggaaggagggtctgtctgtgcagagaccacagagatcacacggcaagagagggagcaagggggagggggagcaatggagcttccaagctctttttaacaaccagctctccaggaactaatagagagggaacttgctaaccccgtctccttgggacagcattgatctgttcatgatggatccacctccatgacccaaacacctcccaagaggcccaacctcccacactgggggttaaatttcaatgtgaggtttgaaggggtcaaacatctcaactaaagtagttgtatcctcagcacgttccatggttactatgagagctataactgagaaagcaggaggaagctagatctcccgccatctgggtgcttgtccgaaagagatgctgtaagtggttacctgtcaatcaagaaatgcaagacaattcatatagagaaactgctatgattagcttcttactggtgtctcctcttcttccaggtaaccccagacacctgcacattctgattgggacctcagtggtcatcatcctcttcatcctcctcctcttctttctccttcatctctggtgctccaacaaaaaaagtaagtctcacggggcacaggccagagagctcagggccatgtggggaagcaggatgggagcacacagctgtgtgttcctcactggcaggatggtccctggcccaagacaggagccacagaggcaggactttctagagagagcaccagactccctgcccctgccttcagctcacagaccgttgcctgattctgaactgtatcctcatgtcccctgcagccactcacatccaggagaaggttccatgacaggcagaaagtgggagacagaatcaatgggatgggaactcagagctattcatgggatgggtccttgagctcagagagatagaatgtctgagtctgctgttggcaactgagggacctcaggcacctatggcctccccctgtttgttggtatctgcttatgaaatgaggacccagaagtgccctccgagctcttttgttgacttccgtctcctacagatgctgctgtaatggaccaagagcctgcagggaacagaacagccaacagcgaggtaggtgctcctcggcccagcctcgtggctagtgttattcccaaacagtcctggaaaacgtgagcaccctccctcactcagcatttccctccctcactcagcatttccctctctccaggactctgatgaacaagaccctgaggaggtgacatacgcacagttggatcactgcgttttcacacagagaaaaatcactcgcccttctcagaggcccaagacaccccctacagataccatcttgtacacggaacttccaaatgctaagcccagatccaaagttgtctcctgcccatgagcaccacagtcaggccttgaggacgtcttctagggagacaacagccctgtctcaaaaccgagttgccagctcccatgtaccagcagctggaatctgaaggcgtgagtcttcatcttagggcatcgctcctcctcacgccacaaatctggtgcctctctcttgcttacaaatgtctaggtccccactgcctgctggaaagaaaacacactcctttgcttagcccacagttctccatttcacttgacccctgcccacctctccaacctaactggcttacttcctagtctacttgaggctgcaatcacactgaggaactcacaattccaaacatacaagaggctccctcttgacgtggcacttacccacgtgctgttccaccttccctcatgctgtttcacctttcttcggactattttccagccttctgtcagcagtgaaacttataaaattttttgtgatttcaatgtagctgtctcctcttcaaataaacatgtctgccctcattgcttcaggtaatgtgacactgtattcgctgaaagaaaccgctgttatcattaccatgtccacataaccccatctgttctccgctgggttctcacccctggactctgagcttctggaagcagggtggagcctcatttgtctctgggactccaatttccatccaaagatgcagcacataggaggttccaaggatcgtgaatcacatgaacaagtgatattcttactctctgcaacctggaaagctggcagagtcattccacgatgaaacatttgtagagtcataagccttgctagtctcatctccacggggacacatatcaacacatcatatttcatactataaatatacagtcgctcctccatatctgtggggtttacaggtgtttattgaaccaagtgtaaatcaaaaatattcagagaaaatgtccacaaagtttcaaaatgcaaaactatgttgaatggacacaaatgaggcagtgtgtaggctgtatcaggaattataagtaatcaagagatgatttcatgtatacaggaggatgtgcatgggttatatccaaatgctgtgtcattttatgtaagaggcttgagcatctgcagattttggtacctgagtggagatcctgaaaccaatcacccacgaatagtaaaggatgaccgtatatgacttttatttctcaattttaaatataaatcataaaaaatgtacaataactagataaaaagtaagaagtgtttttatagtgtgagaataagtttagatttattttttcctacgtgtaaccctttggtttaatattatttattaagaagacattctatgccaccttaaaccacacggcagcctttgtcaactctaaagggactgtgtgtacacggatgtattttagacactgtttctgctaaggggctctctgtgtccacactcttgaggatgctgcacttcatgtagccttataaaaccctttaaatttagtagccagagccctctaatttgttattataggctacttgctatttttttttcttgaggcggagtcttgctctgtcgcccaggcgggactgtagtggagcaatctcagctcactgcaacttccgcctcccaggttcaggcgattctcgtgcctcagtctcttgagtagctggcgtttcaggtgcctgccaccaggcatggctaatttttgaatttttagcagagacgcggtttcactgtgttggccaggctgctctcaatctcctcatctcagttgatccgcccacctcggcttcccgacctgctgggggaaacttgattttctatagcattatgttactggatatttctgtaaaatttaaaatgagggaggcagagagacagagagagagcaaactccagagttgggactctggaatcttgagtcatgagacaaattatagataaaactacaaaaatccagaatttacatgtgtggtttttgctgataaagtacaattctaagattgtaaataattgcataatccttccctgggaatttaaatcatttgaactggttctgctgtaatactagaaatacaagcatgaacaattctaatggtttattagtcacaatgactctgaaaacactaataatacctattagatattttgcatattacacaggaagaagagttcgaatctcagataaaaacaataaaaattcatgaaaagtctttcatgttagcacagattttaggcatctcatgtttgggaggttggatctaagacatgttttgagttggtcatagtgaaggacgcgaggtgtcaattctagtgagagcaatttccaggaagccatgttctgctcttgagcgagcacccactgggcctcatgcaaggtagaaaaagcctgcgtacgtcaccctcccatgatgtggtcaacatgtaaactgcatgggcagggcgccaaataacatcctgtgcgctgctgagctgagctggggcgcggccgcctgtctgcaccggcagcaccatgtcgctcatggtcatcatcatggcgtgtgttggtgagtcctggaagggaatagagggagggagcgtggggatggagatctgggcccagaggtggagatatgggcctggaggtggagttatgggcctggagtggagatctgggcctagagatggagtgatgagcctagaagtggagatctgcgcctggagtggagatctgggcctggagtgaagatctgggcctggagtggagatatgggcctggagtggggataggaacctggagtggagagaggaacctggaggagagataggaacctggaggggaggtaggagcctagggtggagatatgggactggagtggagatatgggactggagtggagatatgggcctggagtggagttatgggcctggagtgaagttatgggcctggaggtggagatacgggcctggagtggagatatgagcctggagtggagatatggtcctggagtggagatatgggcctggagtggagatatgggtctgcagtggagttatgggcctggagtgaagttatgggcctggaggtggagatatgggcctggagtggagatatgggactagagtggagataggggcctggaggtggagatctgggcctggagtggagatctgggcctggagtggagatctgggcctggagtggagatatgggcctggagtggagatatgggtctgcagtggagatatgggcctggaggtggagatatgggcctggagtggagttatgggcctggagtgaagttatgggcctggaggtggagatatgggcctggagtggagatatgggactagagtggagataggggcctggaggtggagatctgggcctggagtggagatatggccctggagtggagatatgggcctggagtggagatatgagcctggagtggagatatggccctggagtggagatatgggcctggaggtggagatatgggcctggagtggagttatgggcctggagtgaagttatgggcctggaggtggagatatgggcctggagtggagatatgggactagagtggagatacgggcctggaggtggagatctgggcctggagtggagatatggccctggagtggagatatgggcctggagtggagatatgagcctggagtggagatatggccctggagtggagatatgggcctggagtggagatatgagcctggagtggagatatggccctggagtggagatatgggcctggagtggagatatgggcctggagtggacatatgggtctggagtggagatacgggcctggaggtggagatatgggcctggagtggagatatgggcctggaggtggtgatatgggcctggagtgtagacatgggccgagtggagatatgggtctggagtggagatatgggcctggagtggagatatgggactggagtggagatataggcatggggtggagacatgggccgggagtggagatatgggactggagtggagatacgggcgtggggtggagatatgtgcctggaggtggagatatgggcgtgggttggagatatgggcctggagtggagatatgggcgtggggtggagatatggatctggagtggagacatgggcatggggtggagatatgggcctggtgtgtagatatgggcctggagtggagatatggccctggagtggagatatgggcctggagtggagatctgggcctacggtggagatatgggcctaggatggggatatgggcctggaatggagatatgggcctgggtgtggagatatgggactggagtggagatatgggcctgatgtggagatatgggcttggagtggagatatgatcctggagtgtagttatgggcctggaggtggagatctgggcctggggtggagatatgggcctggagtggagatatgggactggagaggagatatgggactggagtggagatatgggcctggagtggagatatgggcctggattggagatatgggccgagggtggagatctgagcctggattggagatgtgggcccggattggctatatgggtctagggtggaaatatcggcctggagtggagatatgggcctggagtggagatatgggcttggggtggggatatgggcctggaggctgggtctctgcacagccgagagcactgttcttgggtgcaggtaggctctgatggtgagtttcccttcggcccaggaaggggctggctatcaagactcacagcccagtgggggcagcaaggaaggccttgtttgcctgcaaatggatcttccatcatgatctttctttccagggttcttcttgctgcagggggcctggccacaggagggtaagtccttctccaaaccttagggtgtcatctccccacataagaggattttcctgaaacgggagggaagtcctgtcagggagtctctcataaactaggaagaggggaccctggggtgctcggcccacagttccgaccttgcctccctggcctctcaaccccttggcagagtcaagttgtgtggggaccagggttggactagggtgttcaaagctgggttgtgtggtggggaagtggtaggaacagcagatcctctgaggacaaaggtgttactcacacacttcagcgtttccatgacggtaggggctgcagtgtggctgctgtcattctaccagaagaggtgggaaaccacagccatggccctgacattccaaatcctctgatgggggctaagttttttattttcattcaggcaactgctgatattccattctcaaaggacatgccctccacttcatgtctaccctgtgttgttttatgtcagtaatcttacagtattaaaatctagtaggagtctcttactcagcacttgctcaaagttctcagctgacacttttgttgtacggagacaccttgtctttgtgggatgggtccttcctttagccctaggcaccaaggtgtgatagcagccatagaaatgtggaaagtggggagaatcttctgagcacagggagggaggcacagctccacatcctcctctctaaggcggcgcctccttcaccccaaggtggtcaggacaagcccttgctttctacctggcccagccttgtggtgcctccagaacatgtgactcttcagtgtcactctaatcttgggtttaacaacttcagtctgtacaaggatgatggggtgcctgtccctgagctgtacaacagaatattctggaaaagccttttcatgggccctgtgaccacgtcacatgcagggacctatacatgccggggttcacacacacactcccccagtgggtggtcggcacccagcaaccccctggtgatcgtggtcacaggtcagagggctcctgtctgggattctccttgtcccacctcctgaatcccagagcttctggtaggcatgtccttgagggtcccatcacgcaggccctaactgtatttggggtaaagggggattgaatacagggaaatgggtgctgtggtgggaagaataagtgtccccagtgatgactgcattctaatccctggagtctgtgactatttatgttataggggaagggactgaaggggaagatggagctcaggttgttgatgagttgaccttgagatggggagacagcctggactgtcccggtgggctcagtataatcacaagtgtccacatgaaaggaggaggaagaggagagtggggattagagcagcgtagtgggagactccatcagctttgaaggtggatgaaggccataagccatgaatgcaggtggcctatagaggctgggaaagtcaagtaactgattctcctgagtctccagagggaacacagccctgcagatgccttgattttagccctcgaaaaacagggtccgctttctgtctccagaatcggagggggtcagtgtgctctctcctgctgccatgcttctgataattttctacagcagcaacaggaaaccaacactggaacccaggtcaaggacaagttaagaaaagacacaaggatagccaggcatggtggcaggtgcatgtaatcctagcgactcgggaggctgagagcaggagaatcgcttgaacccaggagacagaggttgcagtgagcgtagaccacaccacttcactccagcctgggtgaaggagtgagactctgtctccaaaattaattaattaattaaagaaaccaaacaaagagaaggttggctacaccgagatcagcaagggtgggatgatgatgccaccaccaggctccatccacatagggaggggttgatactcctcaaatcagcacgaggagccagcctatggaaactggcaccatggagaaggcacagacatggcaagagtggctcccagtccccaccaggaacagggtgtgtggacactggtgcctgccttactgatcagttcatacctcctgccaaggattccaattcgtccaaaagagattgaaccaagctgctaagagccgggacgtgcagcctatcctgcttcctcttccactcccacatagacagtaagaaagacattagtgtgaaatagatacaacagcccaagagatgaggctgagcccagtgggaagggaatcacagctactagagacagagggacagagaagagggagggagacagatggaaggacctgcaccaggagttatgggcacagaaaagaacatgaagacacagagaggaagcagagagacagacaccagcgaagggaaggctcactcattccaggtgccatggatgggatgataaagagagacaccttctaaactcacaacctctcttcctaggagtccacagaaaaccttccttcctggccctcccaggtcacctggtgaaatcagaagagacagtcatcctgcaatgttggtcggatgtcatgtttgagcacttccttctgcacagagaggggaagtttaacaacactttgcacctcattggagagcaccatgatggggtttccaaggccaacttctccattggtcccatgatgcctgtccttgcaggaacctacagatgctacggttctgttcctcactccccctatcagttgtcagctcccagtgaccctctggacatggtgatcataggtgagagtgtccagacattcttctcattgtcattgggatgcagagtgaatgatccaggacttggagacccaggtggttgtaaggaagatgagcttggtattcttatggagagagactgacttggtgaggtctgtgccaacagagacagagaaacaagagacacaagtacagaccaggtgtcataacagaggacaaacacaggggccatacagggagttagaaaagacagaaagagttaaaggagacagacagacatgtcccagacagaggtgtccttccatgctgactttgctcagagacctggcacaggttagaagtttcatttctgttttacctccacaaagtgttctctaccaggagaacccaaggacacccatatttctgacctgagttgggccctgtggcctcaggccttgtggcacctacagatgccatgcttattctgacacctctgacttccatgcaatggagaataatcgtcccaaaatatcatggccccagaacaccaacccctgtatgctgtgtgaacttgtggtctccagactggattctgaggctcacattccaaataaccccacatatcacatatgagaggatcactgagaagcacagagagaaatcagggacaccaaaaagcaaagacataaacacacagagaaagagccagaggaaggagattgagagactcacagacacataaagagagagaagagggcagagaagtggagagaatgatggaagagagcagagaaaaccactaaaattagagtcctgagggcgaggcacaagggcatagaaagatggagatgtggggatgaattgcagagattccaaagagaactagagagaccgagaggcagagcaagacagatgatagatggatagatacagatagatgatggatagatatagatagatgatatataggtagatgatagataataggttatagatacatagatgatgattgattgattcattaatagatgatacatagagatgatgatgatgaagatagatggatagataatacatagagatagagaggaagacaaagagagaaataatagagagagagagatgatacatatatatagataatagatgattgacggatagacaattgatagataaatagatgatatatagatatagatgacaggtagagaatttgtagataggcaccgaatagataaatagatggattgatagataatagatagaaatatgcagaaagttatgaacgggacacaaactgagaaactcagagttaaaaaaagtaacatcaagtcaaccaatccaaggagagccagagagaataaaacaatccaaaaacggaaaacataactagaggtagggaagtgaggtcagagacctacagagacagagaaggtggaaggaggaaatagacatgaagagagatagggtggagggtgagacagagaaagagagcattaggccatagagcaggggagtgagttctcaggtcaggtgtgaggggagctgtgacaaggaagatcccccctgaggaaactgccccttctccttccaggtctatatgagaaaccttctctctcagcccagccgggccccacggttcaggcaggagagaatgtgaccttgtcctgcagctccatctatccagggaaggggaggcccatgaacgtaggctccctgcagtgcgcagcatcaacggaacattccaggccgactttcctctgggccctgccacccacggagggacctacagatgcttcggctctttccgtgacgctccctacgagtggtcaaactcgagtgatccactgcttgtttccgtcacaggtgaggaaaccccatatctgtcccatgtcctatgatcctagagccttagctgaggagcttcctgctgatgatggagagaagcatggacagatgcagagagaagacgcagcatgcctgtgagggagggatcagggcgcaggatggcacacacagcacctccaaaccctcctgcatggcctgcatggaggcctccgattagggctccagaaacccaggcagatgtagaaagcggtcaggagagacccagagaaggggagactgggctcagtttggggagatcagaggttccctcagcccctcaaccttacccatttcccagaagcccttcctggcctctcacccacacagagatgtcatcaccagcaacccctacatccttttctttttgtttgaaaaaatattcattgaggttaaatatacctatatagcttaccacttttaacatttttttttttttgaggtggagtctagctctgtctcctatgctggaatgcagtggcacaatctcagctcactgtaacctccgcctcctgggttcaagcgattctcctgcctcagccacctgagtagctggtactacaggcgcccatcaccacgccgggctactttttgtatttttagtagagagggggtttcaccatgttggtcgagctgctctggaactcctgaccacgtgatccacccgcctcaggctcccaaagtgctgggattacaggcatgagccaccgcgcccggccacgtttaccaattttaagtgtaaggtctagtggtcataaatacatacatataaattttttgtttgtttgttttatcctccacccttttcttcctggcctctggtagccaccattctactctctatcttcatgagatccaccttttagctcctgtatatgggtgagaaatgagaatatttgtaatgacttccagttccatccatgtggctgcaaatatcaggatgttattctttctatggatgagtagtctccgctgtgcgtatgtactacattctctctatccattcatccactgatgggcaggtaggttgactccacatcttggctactgtgaagagtgctgcaccaatcatacgagtgcagatatcacttcgatacattgatttactttcctttggatataaacccagtagtgaaattgctggatactatgaaagttctctttttagtttttcgtttgttgttttgtttttgtttttgagacagtttccctctgtgcccaggctggagtacaagtgatgtgatcttggctcattgcaacctccgcctcctgggttcaaatgattttcctgcctcagcctccctagtagctgggattacaggtgcacgccaccatgccgggatactttttggttttttttagtgtacatggggtttccccaggttggctaggctgctctcaaactcatgacctcaactgaggtgcccgcctcggtctcccaaagtgccgggattacaggcatgatccacttcatccaacctctttttagttctttaaaggacttccatacttttctccgtaatggctgtactaatttacactcctaccaacagggtaccagggttctcctttctctaccaccttgccagcatttgttttgcctgtcttgcagctaaaagccattttattttatttcattttattttgagatggagtttcgctcttgtcacccaggctggagtgcagtggtgcgatctcggctcaccgcaacctccacctcccaggttcaagcgattctcctgcctcagcctcccgagtagctggaattacaggcacacgccaccacgcccgactaatttttgtatttttagtagagacagcgtttctccatgtgggtcagactggtctcaaactcccgaccttatgagattcgcccacctcgggctctcagagttctaggatgacagacgtgagccacctcgcccggcctaaaagccattttaatggggtgagatgaaaactcactttgattttaattcgcgtttctctgatgatgagtgatactgagcactttttcgtatgtggggaaatttcatgtcttttgctcctttttcaattaaatcatttgttttattgagttgtttgagcttcttatacttctagttattaatcccgtctcagatgcatagtttgcacatatttgctcccaatctgtgggttgtctcttcactttgttggtttatttttagcggtgcagaagttgcttagtttgaggtaatcccaatggtctatttttgcttcgattacttgtgttttgaaggtttaaaacaaaatgtcttccttcagacaaatgtactggagcatttccccaatattttcttctacgtgtttcacaggttcaggccttagactcacatctttaatccactttcatttgatttttgtgtatggtgacaggtagaggtgcagtttcattcctctgcatgtagatgtccaggtttccctgcactgtttattgaaaaaactgtcctttcctgattgtgagttcttggcacctttgtcaaagtccattggatgggctgggcatggtggctaacaccagcaacttcagcactttgggaggccaaggctggtggatcacctgaggacaggagtacaagattactctggccgacgtgatgaaacctcgtctccactaaaaatataaaaattagctgagcatggtggtcagcacctgtaatactactactcaggagtttgaggcaagagaattgattgaacccaggaggctgaggttgcagtgaaccgagattgcacctctgcactccagcctgggtgacagagcgagactccatctcaaaagaaaaaataaaaaaaattggatgtaaatgcatggattatatctgtgttcttcattctgctccgttgttctatgtgcctttcttcatgccaacatcatgctgttttgcttactacagctctgtaacatattttgagatcaggtagtgtgatgctcctgttttctctttataccttgaagtctcaagacagtgggcgtcacatacaaaaattatggaagaaaggatccctggactcccagggcccaatgttagataacagagtgttggccatgaaccaaactcaaagatttccactgagtagaggacagacaccctcatttcctcacctctctcctgtctcatgttctaggaaacccttcaaatagttggccttcacccactgaaccaagctccaaaaccggtgagtacaggaccctcttatatccgcttttggaaccctggggaggtggaaaccttggattcaggcgttgactcagcatctcacagctctgacattgtacgcctgtcttctaccatctccgaactccagatactccaacagcgaaagggatctgggcccaacacagggctcagtgaaatctcttcatctctcattttatggagctgagacctcctacaagctagaagaatgattgccaatctgacatccttctcaggaaaaacgcaatgtttgttctgcttgcattcctaactggaggataaattcctgggggcttgagagagggaagggaagcgaacatctgatgagggcgaggtgttttagagaagttccacttgccaaggaatgagctcctgttggtcatgaaacaaccctggctgactcagcagagcaagagccttgccgtaacagagaacagagctcatgcacgcacactttgactcactgacttattcagccacggccccatgctcaggttgtgcagtgtggaagcttttcctattgttgccataacaaatttccacaagattcgtgggtgaaaacaaaacggttatttaattatcttacagtgctctagctcaaagcatgaagtgcatctcactgggctaaaatcaagatgacagcaagcctgccttccctctgaggattccaggcaagaatctgcttctcacttgtcccatcttataaaggctcccagttccttggctgctggtccctttcctccttcctcaaaacccacaaagactggtcacatctcacatggcatcactcagacccttcttccttaccacacctctttctctgaatgctgctctcccttcttcctcatcttttgaaaacttggggattctattgggttcaccaagatgaaaatccgtcataatctcccggaaatcattcaggatacccttgttttaagttcagctgattagcaaccataattccatctgcaatcttcattcctcctttccatgtaaaataacatattcacaagctatggaggctaggacagggacattttggggtgggacagcattctcctgccttccacaaatggtgaacaagatgcatttggcctctgctcttgggacactgatattgcagatggttaaatgggaggacagaaaatgaatgcacaagtggaccaataaatgaatgatccattgggaagcatctgtgcatgaaatctatttgtttgttcgttcgtttgtttattgagacagagtctccctctgtcttccaggctacagtgcagtgtcacgatcttggctcactgcaacctgcgtctcctggatccaagtgattctcctgcctcaccctctcgagtagctgggattacaggcaactgccaccatgcccggctaattctttttgtatattttttgtagagaggatgtttcaccatgttggccaagcttgtctgaaactcccaacctcaagtgatccgaccatctcagcaacccaaagtactgggattacaggcgtgagccactttgcccagccagaattcaaaataaataatagataatgctgagtgtataattttgggtgacagagaaggtctcactaatcagatatttgtgacattaatgaaaaacacggattgaacccctgaaagattggcggaaggattttccacacacagctgtcagctgtgaaggcacaaaggtgaaaacaatctgatgttgaaggaagaggctctgcctgaaatgctgggaatgaggtggggagaatgacaagatgactgtagagagatggagagcactctgggtacacaggaaactaaggaggaacaaggagtgtgtgtttgacactcacagccattggattcacctcggggtaaccaggaatccctacatgattaatagtgactgacaagaaaataagggaggcccaggtgcgtaactggaatctaggagactgtggaaaaggcaattgccgccccactggtgaaatgtggtgctgatttagacactaaatgaatgaagtagatggatataagatatgcttgtgaggtagaatcattggctggaaaggcttgctgggtttgattttcctacttgtttaatcctcgcttaattaatttctttctgagatttattcatcctacacataaatcaatacctggcaaaggagtgacagatatatgaggggtggtggaaatgaagggacctattatagcataatatacaagtctgtgaacggtggctcatgcttgtaacccagccctgcaggaggccaaggcgggtggattccatgaagtcaggagttccagaccagcctggccaacatggtgaaaccctatctgtactaaaaatacaaaaattagccgagcatggtggtgcatccctgtaatcccagctcctactctggaggatgaagcaggagaatgacttcaacccaggaggtggaggttgcagtgagtggagattgcatcactgcactccagcctgggtgacacaaggagactccgtctcaaaaaataaaaataagaaatgcataaatataataaaacacacacgaatgacaaaggcacctgaattccaatcatcatttttctatttctctataattacttctttgatcctttatcttatccattaggcaatgagcctaaaacctcttccctatttggctttctgtgagcatgagatcacatagaaaatgtgaaagcccgctgaatcctccagcacggatcctggaatagagaaagtgctctggtcatcgcaaaaaaaaacttgcccactcacccaaatcccccacctcacccctacttccaatcacctgtggagattcagatagaccatggggaggaaacattaatactccttggagtgagtccagatcttggaatcagagatcagcgacagcactagctcctgttcccctttcctactaattcacaggaggacaggtggtattgaagcaatagatggtcgagggggtggtccttcccccagcctctcgggtagaacagcagcctaacatgtgtctcccgagatcacaaagagtagcacatttcacacgggcttcaacactatttcctggctgtttgacataagagaatcttgcttcgctatttttaatcgtgatttcacctttgtttcctttccttggtgaatgcaatttgtttgactcaagaatgctgtggatgtagaaatcctaaagcacattcgctgtgtatcaatcccagtgcagtcttcccagagaagactctaaacaaatcctggactgcacctgggcctatgccaattcctatcactcaccgtcactccagggagacagaacacacagagaatacgttacataggcaggttcattactaacagataagcagcgagtgacaacagaagcctgcatttcaatgtgagccagtccctcaaggctcagaaaagctgctcgggacatatggagtcaccccatttgcagtgtagctgcgggaagccagaaagcagcccagcctgggttttgtaccctggagccacaggaagcactcagctaaagcactgcatgacgtcctcctccaggaagaacaggaagacagcccaggctgttctgagacattcctcctgatctcaggatgttgctatcttagtccatttttgttgctctaaaggaacacttgagcctgggtaacttctaaagaaaagagattggtttgcctcacagttctgcaggctgtactggaagcatggcaccagaatctatttctcgtgacggcctcaggctgctcccactctggcagaagggaaggagggtctgtctgtgcagagaccgcagagatcacacggcaagagagagagtaagggggagagggagcgatggagcttccaagctctttttaacaaccagctctccaggaactaacagagggggaacttgctaaccccgtctccttgggacagcattgatctgttcatgatggatccacctccatgacccaaacacctctgaagaggcccaacctcccacaatgggggtgaaatttcaatgtgaggtttgaaagggtcaaacatctcaactaaagtagttgtatcctcagcacgttctatggttactatgagagctataattgagaaagcaggggaaagctaggtctcccgccatttgggtgcttgtcctaaagagacgttgtatgtggttacctgccaatcaagaaatgcgagacaattcataaagaggaactgctatgattagcttcttattggtgtctcctcttcttccaggtaaccccagacacctacatgttctgattgggacctcagtggtcaaaatccctttcaccatcctcctcttctttctccttcatcgctggtgctccgacaaaaaaagtaagtctcacgaagcagaggccagagagctcagggccatgtggggaagcaggatgggagcacgcggatgtgtgttcctcaccagcaggatggtccctggcccaagacaggagccacagaggcaggactttctagagagagcaccagattcccttcccctgccttcagctcacagaccattgcctgattctgaactgtatcctcacgtcccctgcagccactcacatccaggagaaggttccatgacaggcagaaagtgggagatagaatcaatgggatgggacctcagagctattcatgggatgggtccttgaactcagagagatagaatgtctgagtctgctgttggcaactgagggacctcaggcacctatggcctccccctgtttgttggtatctgcttatgaaatgaggacccagaagtgccctccgagctcttttgttgacttccgtcttctacagatgctgctgtaatggaccaagagcctgcagggaacagaacagtgaacagcgaggtaggtgctcctccgcccagcctcgtggctagtcttattcccaaagagtcctgaaaaatgtgagcaccctccctcactcagcatttccctctctccaggattctgatgaacaagaccatcaggaggtgtcatacgcataattggatcactgtgttttcacacagagaaaaatcactcgcccttctgagaggcccaagacacccccaacagataccagcatgtacatagaacttccaaatgctgagcccagatccaaagttgtcttctgtccacgagcaccacagtcaggccttgaggggatcttctagggagacaacagccctgtctcaaaaccgggttgccagctcccatgtaccagcagctggaatctgaaggcatcagtcttcatcttagggcatcgctcttcctcacaccacgaatctgaacatgcctctctcttgcttacaaatgtctaaggtccccactgcctgctggagagaaaacacactcctttgcttagcccacaattctccatttcacttgacccctgcccacctctccaacctaactggcttacttcctagtctacctgaggctgcaatcacactgaggaactcacaattccaaacatacaagaggctgcctcttaacacagcacttagacacgtgctgttccacctcccttcagactatctttcagccttctgccagcagtaaaacttataaattttttaaataatttcaatgtagttttcccgccttcaaataaacatgtctgccctcatggtttcggtaacgagactcttttcttgcctaaggcttccggtgttatcattaccatgtccacataaccccatctgttctccattgggttctcagccctggactctgagcttctggaagcagaatggagcctgatttgtctctgagactccaatttccatccaaagatacagcacataggaggctccaaggatcgtgaatcacatgaacaagtgatattcttactctctgcagacctggaaagctggcagagtcattccacgatgaaacatttgtagagtcataggccttgttagtctcatctccacggggacacatatcaacatatcatctttcataatataaatatacagtcggtcctccatatctgtggggtttacaggtgtttattgaaccaacaataaatcaaaaatattttcagaaaaaaatccccgaagtttcaagaagcaaaaaactatgttgaatcgacacaaattgagtggcgtgtaggctgtgtcaggaattataagtaatcaagggatgatttcatgtatacaggaggatgtgcatgggttctatgcaattgctatgctattttttttttttttttgagacagtctcactctctcacccaggctggagtgcagtggcatgatctcagctcactgcaacctccgcctcccaggttcaagcgattgtcttccctcagcctccccagtagcctcccctaggattacaggcacgtgccaccatgcacagataaatttttttgtgtgtgtatttttagtagagacggggtttcagaa[136 bp omitted]gattttggtatctgaatggggatcctggaaccaatcacccaggaatagtgaaggaccacagtatataatttttatttgtcaatcttaaaaataaagcataaaaagtttacaacaacaagataaaaaataagaagtgtctttatagtgtgaggataagtttagatttattttttcctacgtgtaaccctatggtcctgtgttatttgttgagaaaatattctattccaccttaaactacatggcagcctttgtcaactataaagggactgtgtatccacagatgtattttagacacagttttctgcccagtggttctctgtatcccctctcatgaggatgctgcatttcatataaacttatagaaccccttaaaatttggtaacctgagttctctgatttgttattataggttatttagtttgcttttttttttctttcttgagacagactcttcctctgtcacccaagctggagttcagtggcttgagctcagctcactgcagcctccgcctcccaggttcaagcaattctcgtgcctcaggtttagtactagaaactcatcaggaaaattagaatggctttttgtcacaattactctgataatgttaataatacctcttagatattttgcacattacacatgaagaaaagtttgaatctcagataaaaacaaaaatacatcaaaagtctttaatgtaagcacagaattcaatcacctcatgtgtgagaggttggatctgagacgtcttttgagtctggtcatagtgaaggatgcaaggtggcaattgtagtcacaacaatttccaggaagccatgttccgctcttgagcgagcacccactgggcctcatgcaaggtagaaagagcctgcgtacgtcaccctcccatgatgtggtcaacatgtaaactgcatgggcagggcgccaaataacatcctgtgcgctgctgagctgagctggggcgcggcctcctgtctgcaccggcagcaccatgtcgctcacggtcgtcagcatggcgtgcgttggtgagtcctggaagggaatagagggagggagagtggggatggagatctcggcctagaggtaaagatatgggcctggagtggagatatgggcctggagtggagatatgggcctgggtgtggagatatgggcctggaggtgtaaatatgggcctggagtggagatatgggcctggaggggagatatgggcctgggtgtggagatatgggcctggagtggagatacgggcctggagtggagatatgggcctggagtggagatatgggcctgcaggtggagatctgggcctggagtggagatatgggcctggagtggagatatgggtctgatgtggagatatgggcctggagtggagatatgggcctggagtggagatatgggcctagaggggagatctgggcctggagtggagatatgggtctgatgtggagatatgggcctggagtggagatatgggcctggagtggagataggggcctggagtggagatatgggcctggagtggagatctgggccaggaagtgttgatctgggcctggagcctgggtctctccacagctgagagccctgttcttggcagcaggtagcagggaggctaagtttaccttcagcccagcaagggcctggctgccaagacacacagtgcagtgggggcagcagggtgccctggtttgcctgcagttggatcgtctatcatgatctttctttccagggttcttcttgctgcagggggcctggccactcatgggtgagtccgtccccaaaccttagggtgtcatctccccacataagaggatttttctgaaacaggagggaagtcctgtcggggagtctctcataaactaggaagaggggacccttggatactcggcccacatttctgacctcgccctccctggcctttctttccctttcctgagtcaagctctgtgaagactggggtgagactggggtgctccaagctggggtgtgcagggaggaagtggtgtcagcagcagagaaagagagggaagcagtgctaggaacagcaggtcctctgaggacaaaggtataactgacaccctccagcgtttccgtgacggtaggggctgcagtgtggctgcggtctttctaccagaagaggggggaaaccacagccatggccctgacattccaaatcctctgagggggctcagttcatgaattggctgatattccattcacataggacatgccctccatgccgtgtctactttgtgttgttttatgtgagtaattttgcagtattaaaatctagtaagagtcacttattcagcacttgctcaaagttctcagctgacacttgttgtagggagacgccatgtctatgtggggtgggtccttcctgtagccctgggcacccaggtgtggtaggagccttagaaagcggaaatgggagaatcttctgagcacagggagggaggggtggctccacatcctcctctctaaggcagtgcctccttctcccccaggtggtcaggacaaacccttcctgtctgcccggcccagcactgtggtgcctcgaggaggacacgtggctcttcagtgtcactatcgtcgtgggtttaacaatttcatgctgtacaaagaagacagaagccacgttcccatcttccacggcagaatattccaggagagcttcatcatgggccctgtgaccccagcacatgcagggacctacagatgtcggggttcacgcccacactccctcactgggtggtcggcacccagcaaccccctggtgatcatggtcacaggtcagaggctttctgtctgggcttctcactgtcccacctcctgaatcccagagcttctggtgggggtgtccatcagggtcccatcacccaggccccaactgtatttggggtcaagggagattgaatacaggggaaatgggtgctgtggtgggaagaataactgtcgccaatgatggctacattgtaaaccctggagcctgtgactatttatgttatagggcaggggactgaaggggaaggtggagctcaggttgttgatgagttgaccttgagatggggagacagcctggactgtcctgctgggctcagtgtaatcacaagggtccgcgtgagaggtggaggaagaggggagtggggattagagcagtgtagtgggagggagacgctatcagccactgtgggctttgaaggtggaggaaggccactagtcacagaatgcaggtggcctctaagggctggagaagtcaagagaactgatttgctgagtctccagagggaacgcagccctgcagatgccttgatttcagcacagggagaactggatccaatttctgtccccagaagtggaaggggtcagtgtgttctctcctgctgccatgtttgtgataattttctgcagcagcaacaggaaaccgacacaggaacccaggtcaaggacaagctaggaaaccaaacaaggatagccaggtgtggtggtgggcacgagtaatccaacgactggggaggctgaggcaagataatcacttgaaccggggaggcagaggttgcagtgagccaagacaacaccactgcactccagcctgggtgaaaaagtgactgtctcaaaaataaattaattaatcaattaattaaagaaaccaaacaaggagaaggttggctaccgtgggatcagcaagggtgggatgctgatgccaccaccaggctccatccacataggaaggggttgatgctcctggaaccagcaccagggaccaccctatggaagctggggccatggagaaggcacagacatggcaggagaggctcccaatccccatcaggaacagggtgtgtggacactgatgtctgccttactgatgagttgatacctctgccagagactccaatttgttcaaaagagattgattcaggctgctgagagcctggacatgcagcctgtcctcttccacccccacatagacagcaggaaagagactagtgggaaagagatacaacagcccaagagatgaggctctcttcacagtgggaagggagtcaggggctactggagacagagggacagagaagagggaggaagacaaatggagggacctgcaccaggggatatgggcacagaaaagacacggagacacagagagggaggagagagacagacctctgggaggggaaccctcactcattccaggtgccatggatgggatgataaagagagatgccttctaaactcacaacttctctttctaggaaaccacagaaaaccttccctcctggcccacccagggcccctgctgaaatcaggagagacagtcatcctgcaatgttggtcagatgtcatgtttgagcacttctttctgcacagagaggggatctctgaggacccctcacgcctcgttggacagatccatgatggggtctccaaggccaacttctccatcggtcccttgatgcctgtccttgcaggaacctacagatgttatggttctgttcctcactccccctatcagttgtcagctcccagtgaccccctggacatcgtgatcacaggtgagagtgtccagacattcttctcattgtcattgggacacagagtgaatgatccaggacttggaacccccaggtggtcatgaggaagataagcgtgggattcttatggagagagactgactcggtgaggtctgtaccaacagagacagggaaacaggagacataagtacagaccaggtgtcataacagaggacagacacaggggccatacggggaagtagaaaagagagaaagaggtaaaggagacactcagacagacagacatgtgccagagagaagtgtccttccatgctgactttgctcagagacctggcacaggttagaagtttcatttctgttttgtctccacaaagtgcttctacgaggagaacccaaggacacccatatttctgacctgagttgggccctgtggcctcaggccttgtggcatctacagatgccatgtttattctgacacctctgccttccatgcagtggagccataattatcccaggatatcatggccccagaacaccaacccctaaatactgtgtgtacttggtgtccccagactagattctgaggctcatattccaaataatcctacatataataggatcactgagagacacagagataaatcagggacttcaaaaagcaaaggcataaacacacagagaatgagccagaggaaggggattgagagactcacagacacacaaaaagaaagaaaagagggcagaggagtggagagaatgctggaagggaggagagaaaagccccaaaatcagaaccctgagggaggggcacaaagacagagaaagataaagatgtggggatggattgcagagattccaaatagaactagagagactgagaggcagagaaagacaaggagatggagagagacagatgatagatggatagatagatatagatagatgataaataggtagatgatagataatggataggttatagatacatagatgatgattgatagatgatacatagagatgatgatgatgatgatgaagatagatagaagacacatatataaatatatagatacatagatgatacatagagactgacaggcagacagagaggtaatagagagagagagagatgatacatagatacagataatacatagatgattgatggatagacagatagacaattgatagataaatgatacatagatatagatgacagataatttgtagatagacacaaaatagatagatagataatagatagaaatatgcagaaagttatgaacaagacagaaagtgagagactcagaattatagaaaaaggaagatcaagtcaaccaatccaaggagagtcagagagaataaaacaatccaaaaagggaaagcatacccaggggtggggaagtgaggtcagagacctagagagacagagaaggcggaaggaggaaatagacatgaagagagttggggtggagggtgagagagagagagagcattaggtcatagagcaggggagtgagttctcagctcaggtatgaggggagctgtgacaaggaagaacctccctgaggaaactgcctcttctccttccaggtctatatgagaaaccttctctctcagcccagccgggccccacggttcaggcaggagagaacgtgaccttgtcctgtagctcctggagctcctatgacatctaccatctgtccagggaaggggaggcccatgaacgtaggctccgtgcagtgcccaaggtcaacagaacattccaggcagactttcctctgggccctgccacccacggagggacctacagatgcttcggctctttccgtgccctgccctgcgtgtggtcaaactcaagtgacccactgcttgtttctgtcacaggtgaggaaaacccgtgtctgtcccatgtcttatgatcctagagccatagctgaggagcttcctgccgatgatggggagaagcatggacagatgcagagagaacacgaagactgggtgtgaggggggggtcagggtgcaggatggcagacagggcacctccaaaccctcttgcatggcctgcatggaggcccatggtcagggctccaggcacccaggcagatggagaaagcggtcaggacagacccagagaaggggagactgggctcagtttggggagatcagaggttccctcagcccctcaaccttacccatttcccagaagcccatcctggcctctcacccacacagagagatgtcatcaccagcaacccctacactcttttcttttcattttcaaaaatatttattgaggttaaatgtaactatataatttaccaactttaccatttttaaaagtaaaatctagtggtcataaatacctttatatgctgggtgtggtggttcacggttgtaatcttggcgctttgagaggccaagaaaggtggatcatttaagatcagggactcgagatcagcctggccaacatgcgggaaattcatctttactaaacagacaagaaaaattagccaagcatgccggcatgcacctgtagtcctagctacttgggaggctgaggcaggagaagcacttaaagccaggaggcagaggttgcactgagccgagatcatgccactgcactgcagcctgggagacagagagagactctgtttctaaataaataaatacatctatattcttttttttgttaccttccacccttcccttcctggcctctggtatccaccattctattctctaccttcatgagatccaccttttatctcctgcatgtggtgagaaatgggaatctttgtaatgacctccagttccatccatgtggctgcaaatgacaggatgttattgtttctatggatgagtagtctccaccgtgtgtgtgtactacagttctctatccattcacccactgataggcaggtaggttgactccacatcttggctactgtgaacagtgctggaacagtcatatgagtgcagatatcacttcgatacactgatgtcctttcctttggatataaacccagtagtgaaattgctggacactatgaaagttctctttttttttttttcttttttgagaaagagtttccctccttagtccaagctggagtcaaagtggtgcgatcttggctcattgcaacctctgcttcctaggttcaaacgattctcctgactcagcctccctaatagctgtgattacaggtgcacgccaccatgcctgactaattcttgtattttttagcacagacgggatatcccaattttgggcaggctgctctcaaactcctgacctcaagtgaggtgcctgcctcggtttcccaaagtgctgaagttacaggcataagccactatgcccagcctccttttagttttttaaagattttccatacttttctccataatagttgtactaatttacattcctaccaacagggtaccagggttctcctttctctaccatcttgccagcatttgttttgcctgtcttgcagataaaagccattttactttactttatttatttatttatttatgttgagatggagtttcactcatagtcgcccaggctggagtgcaagggtgtgatctcggctcactgcaacctctgcctcccgcgttcaactgattctcctgcctcagcctccaaagtagctgggattacaggcatgtgccaccacgcctagctaatttttgtatgtttagtagagagggagtttctccatgttggtcaggctggtctcccgacctcaggtgatccgcccacctccgcctcccaaagtgctggaattacaggcgtgagccaccggcctaaaaggcattttaatgggatgagatgaaaactcatcgcgattgtaatttacatttctgtgatgatgagtgatgctgagcactttttcatatacgtgatcgccatttctatgttttgtttgtggagaaatgtctcctcatgtcttttgctcgttttttaattaaattgttttattgagttgtttgagcttcttatatttccagttattaatcccatctcagatgaatagtttgcaaatatttgctcctattttgtgggttgtctcttcactttgttggtttatctttggtggtgcagaagttgcttggtttgatgtaatcctaatggtctattttttgctttgattacttgtgttttgaaggttttaaacaaaatgtctttcatcagacaaatgtcttccccattattttcttctacatgtttcataggttcaggccttagactcatgtttttaatccattttcatttgatttttgtgtaaggtgacaggtatagatgcagttttattcctctgcatgtagatatccagttttccccacaccatttattgaagactgtcctttcctgattgtaagttctcggcacct[134 bp omitted]tctactaaaaatacaaaaattagctgagcatggtgatcagtgcctgtaataccactactcaggagtttgaagcaagagaatttcttgaatccaggaagtggaggttgcattgagctgagattgcacctctacactccagcctgcatgacagagcaagattctatcacacacacacaaaagaaagccattggatgtaaatgcatggattatatctgtgttctccattctgttccattttttatgtgcctttctttatgccaatgtcatgctgttttgcttactacagctctgtaacatatttctaagtcaggtagtgtgatgctcctgttttctctttataccttcaagtctcaagacagtgggcatcgcacacaaaaattatggagaaaaggatcccaagactcccagggtccaacattagataacagagtgttggccatgaaccaacctcaaagatttccattgagtagaggacaagcaccctcatttcctcacatctctcctgtcccgtgttctaggaaacccttcaagtagttggccttcacccacagaaccaagctccaaatctggtgagtaaaggacccctcttatctctgcttttggaaacctggggaggtggaagccttggatgcaagtgttggctcaaacctcccagctctgtgaatgagggcctgtcttccaccatctctgaactccagacactccaacagtgaaagggatctagggccaccaaagggctcagcgaagtctctttacctttaatttcctgcaggtgagacctcctacaagctagaagaataattgccaatctgacatccttctcaggaaaaatgcagtgttttttctgcctgcattcctaactggaggataaattcccgggggcttgagagagggaagggaagggaacatctgatgagggtgggtgttttagagaagttccacttgccaaggaatgaattactgttggtcatcaggcaaccctggctgactcagcagagcaagagccttgccgtaacagagaacagagctcatgcacgcacacttcgactcagtgactcattcagccacagccccatgctcaggctgtgcagtgtggaagcttttcctattgttgccataacaaatttccacaagattcgtgtgtgaaaacaaaacggttatttaattatcttacagtgctgtagctcaaagcatgacgtgcatgtcactgggctaaaatcaaggtgacagcaaggctgccttccctctgagggttccaggcaagaatctgcttctcacttttctcagcttctagaggctcccatgttccttggctcctggtacccttcctccttcctcaaagcccacaaagactggtcacatctcacatggcatcactcagacccttcttccttaccacacctctttctctgaatgctgctctcccttcttgcccttcttttgaaaacttggggattctattgggttcaccaagatgaaaatccatcataatctcccggaaatcatccaggataccctccttttaagttcagctgactagcaaccataattccatctgcaatcttcattcctcctttcatgtaaaataacatattcacaagctatggaggctaggacatggacatttttggggtgggacaacattctcctgccttccacaaacagtgaacaagatgcatttggcctctgttcttgggacactgatcttgcagatggttaaatgggagggcagaaaatgtaggcacaaggggaccaataaatgaatgatctattgagaagcatctgtgcatgaaatctatttatttatgtatttacctacttgtttattgagacggagccttgctctgtcgtccaggctagagtgcggtggcatgatctcggctcactgcaacctccacctcctgggctgaactgatctcctccctcagcctctccagtagctgggattacagaccacaaccaccacgcccggctaactctttttgcatattttctgtagagaggatgtttcaccatgttggccaggctggtctcaaattcccaacctcaggtgatccaatagcctctgcctcccaacacgctgggataagaggcatgagccacggggccaagccaaattttcaaatcaataatagataatgctgagtgtattatttcaggtgacagagaagttctcactaatcagatatttgtgacattaatgaaaaacacggattgaacccctgaaagattggcggaaggattttgcacacacagctgtcagccgtgaaggcacaaaggtgaaaacaatctgatgtggaaggaagaggctctgactcaaatgctgggaatgaggtggggagaatgacaagatgactgtagagagacggagagcacactgggtacacaggaaactaaggagcaacaaggagcgtgtgtttgacactcacagccattggattcacctcgaggtaaccaggaatccctacatgattaatatgactgacatgaaaataagggaggctcagttgcataactggaatctaggagaccgtggaaaaggcaattgccgccccactggtgaaatgtggtgctgatttagacactaaatgaatgaagtagatggatataagatatgtttgtgaggtagaatcattggctggaaaggcttgctgggtttaatttttcctggtagtttaatcctcgcttcactaacttatttctgagatttatttctcctgcatctaaatcaatacctggcagaggagggagagctagatgaggggtggtgcaaatgaagggacctagtatagcataatatacaaggctgtgaacggtggctcacgcctgtaacccagcacttcaggaggccaacgcgggtggatcacatgaagtcaggagttcgagaccagcctggccaacatggagaaaccctatctctactaaaaatacaaaaattaaacaggcatgatggtggtgcatgactgtaatcccagctactctggaggaggaagcaggagaatgacttcagccctggaggcagaggttgcagtgagtggagatcgcatcactgcacaccagcctgggctacacagggatactctgtctcaaaaaataaaaataaaaaatacataaatataataatatacacaaatgatgcaggcacctgaattccaatcatcatttttctattcctctataattacttctttgatcctttatcttatccattagaaaatcagcctaaaacctcttccatatttggctttctgtgaacatgagatcatatggaaaatatgaaagccccctgaacccaccagcacaggccctgaaatagggaaagtgctctgttcatcacaagaaactttccccctcacccaaatcccccacctcacccctacttccaatcacctgtggagatacagatagatcatggggaggtaaacgctaatactccttggagtgagttcagatcttggaatcagagatcagcaccagcactagctcctgctcccctttcctactaattcacaggaggacaggtggttttgaagcaatagatggtggagggggtggtctttcccccagcctctcaggtggaacagcagcctaacatgtgtctcgcgagatcacaaagagtagcacgtttcacatgggcttcatcattatttcctggctgtttgacataagagaattctactttgcttttttgatcttgatttcacttttgtgtccttttcttggagaatgtaatttgagtcaagagggttgtggatgtagaaactgtaaagcacattcactgtgtatcaatcccagtccagtctttccagagaagactctaaacacctgctgtactgcacctgggcctatgccaatttctatcactcaccgtcactccagggagacagaacacacagagaatacgttacataggcaggttcattactaacagataagcagcgagtgacaacagaagcctacatttcaacgtgagccagtccctcaaggctcagaaaagctgctcgggacatatggagtcacctcatttgcagtgtatctgggggaagccagaaaatagcccagcctgggttttgtaccctgaagccacaggaagcactcagctaaagcactgcatgacgtcctcctccaggaagaacaggaagacagcacaggctgttctgagacgttcctcctgatctcaggacgttgctgtcttagtccatttttgttgctataaaagaacacttgagcctgggttacttcttttttttttttttttttttttgtatagtgcttctgatgagcttttttttaaaatttttattattattatactttaagttttagggtacatgtgcacaatgtgcaggttagttacatatgtatacatgtgccatgctggtgtgctgcacccatcaactcgtcatttagcattaggtatatctcctaatgctatccctcccccctccccccaccccacaacagtccccagagtgtgatgttccccttcctgtgtccatgtgttctcattgttcaattcccacctataagtgagaacatgcggtgtttggatttttgtccttgtgatagtctactgagaatgatgatttccaatttcatccatgtccctgcaaaggacatgaactcatcattttttatggctgcatagtattccatggtgtatatgtgccacattttcttcatccagtctatcattgttggacatttgggttggttccaagtctttgctattgtgaatagtgccacaataaacatacgtgtccatgtgtctttatagcagcatgatttatagtcctttgggtttatacccagtaatgggatggctgggtcaaatggtatttcaagctctagatccctgaggaatcgccacactgacttccacaatggttgaactagtttacagtcccaccaacagtgtaaaagtgttcctatttctccacatcctctccagcacctgttgtttcccgactttttaatgatcgccattctaactggtgtgagatggtatctcattgtggttttgatttgcatttctctgatggccagtcatggtgagcattttttcatgtgttttttggctgcataaatgtcttcttttgagaagtgtctgttcatgtcctttgcccactttttgataggattgtttgtttttttcttgtaaatttgtttgagttcattgtagattctggatattagccctttgtcagatgagtaggttgcgaaaattttctcccattttgtaggttgtctgttcactctgatggtagtttcttttgctgtgcagaagctctttagtttaattagatcccgtttgtcaattttggcttttgttgccgttgcttttggtgttttagacatgaagtccttgtccatgcctatgtcctgaatggtaatgcctaggttttcttctagggtttttatggttttaggtctaacgtttaagtctttaatccatctcaaattaatttttgtataaggtgtaaggaagggatccagtttcagctttctacctatggctagccagttttcccagcaccatttattaaatagggaatcctttccccattgcttgtttttctcaggtttgtcaaagatcacatagttgtagatatgtggcattatttctgagggctctattctgttccattgatctatatctctgttttggtaccagtaccatgctgttttggttactgtagccttgtagtatagtttgaagtcaggcagcatgatgcctccagctttgttcttttggcttaggattgacttggcaatgcaggctcttttttgattccatatgaactttaaggtagttttttccaattctgtgaagaaagtcattggtagcttgatggggatggcattgaatctataaattaccttgggcagtatggccattttcacgatcttgattcttcctacccatgagcatggaatgttcttccatttgtttgtatcctcttttatttcattgagcagtggtttgtagttctccttgaagaggtccttcatatcccttgtaagttggattcctaggtattttattctctttgaagcaattgtgaatgggagttcactcatgatttggctctctgtttgtctgttattggtgtataagaatgcttgtgatttttgtacattgattctgtatcctgagactttgtagaagctgcttatcagcttaaggagattttgggctgagacaatggggttttctatatatacaatcatgtcatctgcaaacagggacaatttgacttcctcttttcctaattgaataccctttatttccttctcctgcctaattgccctggccagaacttccaacactatgttgaataggagtggtgaaagagggcatccctgtcttgtgccagttttcaaagggaatgcttccagtttttgcccattcagtatgatactggctgtgggtttgttatagatggctcttattattttgagatacgtcccatcaatgcctaatttattgagagtttttagcatgaagcgttgttgaattttgtcaaaggccttttctgcatctattgagatagtcgtccggtttttgtctttggttctgtttatatgatggattacatttattgatttgcatatattgaaccagccttgcatcccagagcctgggcaacttctagagaaaacagatttgtttgcctcacagttctgcaggctgtactggaagcatggcaccagcatctgtttcctgtgacggcctcaggctgctcccactctggcagaagggaaggagggtctgtctgtgcagagaccacagagatcacatggcaagagagggagcaagggggagggcgagcgatggagcttccaagctctttttaacaaccagccctccgggaactaatagagggggaacttgctaaccccatcatgtggggcagcattaatctattcatgatggatccacctccatgactcaaacaccttcccataggcccaaacttccacactgggggttaaatttcaatatttcagtgtgaggtttcaaagggtcaaacatctaaactaaagcagctgtatcctcagcatgttctatggtttctatgagagctgtaactgagaaagcaggagaaagctgggtctcccgccatcaggctgcttgtcctaaggagatgttccatgtggttacctgtcaatcaagaaatgagacaatccataaagaggaactgctatgattagcttcttattggattcccatcttcctccaggtatctgcagacacctgcatgttctgattgggacctcagtggtcatcttcctcttcatcctcctcctcttctttctcctttatcgctggtgctccaacaaaaagagtaagtctcacgaagcagaggccagagagctcagggccatgtggggaagcaggatgggagcacgcgggtgtgtgttcctcactggcaggatggtccctggcccaagggaggagccacagaggcagggctttctagagagagcaccagacaacctgcccctgccttcagctcacagaccattgcctggttctgaactgtatcctcacatcccctgcagctactgacatccagaagcttccatgacaggcagaaagtgggagacagaatcaatgggatgccaattgagagcacttcatgggatggggtcttgaactcagagagatagaatgtctgagtctggatgttggcagctgaagagcctcaggcacctacagcctccccctgtgggttggtgtctgcccatgaaatgaggacccagaagggccctccaagcggttttgatgacttccgtctcctacagatgctgctgtaatggaccaagagcctgcgggggacagaacagtgaataggcaggtaggtcctcctcggcccagcctcacggatacagtcttatccctaatagtcctgaaaaatgtgagcaccctccctcactcagcatttccctctctccaggactctgatgaacaagaccctcaggaggtgacgtacgcacagttggatcactgcgttttcatacagagaaaaatcagtcgcccttctcagaggcccaagacacccctaacagataccagcgtgtacacggaacttccaaatgctgagcccagatccaaagttgtctcctgcccacgagcaccacagtcaggtcttgagggggttttctagggagacaacagccctgtctcaaaaccaggttgccagatccaatgaaccagcagctggaatctgaaggcatcagtctgcatcttaggggatcgctcttcctcacaccacgaatctgaacatgcctctctcttgcttacaaatgcctaaggtcgccactgcctgctgcagagaaaacacactcctttgcttagcccacaagtatctatttcacttgacccctgcccacctctccaacctaactggcttacttcctagtcctacttgaggctgcaatcacactgaggaactcacaattccaaacatacaagaggctccctcttaacacggcacttacacacttgctgttccaccttccctcatgctgttccacctcccctcagactatctttcagccttctgtcatcagtaaaatttataaattttttttataacttcagtgtagctctctcctcttcaaataaacatgtctgccctcatggtttcgataatgtgactctttattcgccaaaagtttccagtgttatcattactatgtccatataacctgatatgttctctactgggttctcagccctggactctgagcttctggaagcagggtggagcctcatttgtctctgggactccaatttccatccaaagatgcagcacataggaggttccaaggatcgtgaatcacatgaacaagtgatattcttactctctgcagacctggaaagctggcagagtcattccaagatgaaacatttgtagagtcataggccttgttagtctcatctccacagggacacatgtcaacacatcatctttcatactataaatatacagtcgctcctccatatctgtggggtttacaggtgtttattgaaccaaatataaatcaaaaatattcagagaaaaaatccacaaagttccaaaaagcaaaaatactatattgtgtggacacaagtgaggtggtgtgtaggctgtatcaggaattataagtaatctagagatgatttcatgtatacaggaggatgtgcatgggttatatgcaaacgctgtgccatttcatgcaacaggcttgagcatctgcagattttggtgtctggtagggaggggggtttcctggaaccaatcacccatgaatagtgaaggacaactgtatataattttcattcatcaattttataaataaatcatcaaaatgtatgataataagataaaaaattagcagtgtttttatggtgtgaaaataagcttagatttattttttcctgcttgtaaccctctggtccaatgttatttactgagaagacattctattccaccttaatccgcatggcagcctctgtcaactataaaaggactgtgtgtacacagatgtattttacacactcttttctgctcagtggctctctgtgtccactctcatgaggatgctgcactttatgtggccttatagaaccccttaaaatttggcagcctgaatcctctaatttctccttcctctttaagattgccattattattattattggctatttgcttttccatgtaaatttgtaatcatttttctcatttccaccaaaaacaatgcttgtaattttgttgtgactcccttacatctacaggtaagttctgtcctatagaaacataatgcaaaccacatgcattctttcaaacttgctagtatccaaattaaaaagctaacaagaaacagataaaattaatttaagttaacccaatggacccaaaatattattaacccaacagacccaaaatattaacctaatagatccaaaatattattttattatacaagtagactcaaaatattatcatttcaacatgtaatcatgtgtcatcttggaaaacatcagatccctgtctaggtgggcaaagatttttcttcgtaatatctcatttccacatttccacttggcacagaaactgcccccaaggctcaggatactaagatgcagtaggaatgggtagatgtatctggaggaaagtgactgaatgaaattgagacatcagagtctgggaaactcactagaactacagggacagtgtgggggagggaattgggagatgttgatcaaaggatacaaactatcaggtattcaggaggaatgggtctgaagatctcttgtacagctttgccactatggttgacaatactgtactctatacttgaaatttaccaggaaagtagatttttttttttaaatatggaacacttcacgaatttgcgtgtcattcttgcgcaggggccatgctagttttctctgtatcgttccaattttagtatatgtgctgccgaggcaagcatgggagagtagattttttttttttttttttttttttttgagctggagtcttgctctgtcacccaggctggagtgcagtggcgcgatctcggctcaccgcaagctccgcctcctgggttcacgccattctcctgcctc[175 bp omitted]cccggctgggagagtagatcttaagggtcctc[140 bp omitted]atggtgaaaccctgtctctactaaaaatgcaaacattagccaggcgtggtgacacaagcctgtaatcccagctactcaggaggctgaggcacgagaattgctggaacctgggagcggaggttgcagtgagccaagatggcaccactgcactctagcctgggggacagagtaagacttcctctcaaaaaaaaaaaaaaaaaaaaaacaataaccctgcgagatgatggatataactagcttgactatgatgatcatgtcaccatgtatacatacatcaaaacatcaagtgtaatacaccttaaatatatacaatttccatttgtcaatcatatctcaataaagctaaaagaaacctctaagtttcaactttattttcagaaagctgtgccatgcttacctcagtgcctaagtatactctaattcatggaaatggcctttaaaactgcagagagtggctgggtgcagtggctcacgcctataatcccagcactttgggaggcggaggtgggcagatcacgaggtcaggagttcgagatcagcctggccaacatggtgaaactctgtctctactaaaaatacaaaaaatagctgggcatggtggcaggtgcctgtaaatctgagatactcaggaggctgagacaggagaatcgtttgaactggggaggcagaggttgcagtgagccgagatcctgccattgcactccagcctgggcgacagggtgagactccatctcaaaaaaaaaaaaaatactgcagagagttaaggccctcactggacactctccggtacctctgaggtcagtggatagagaagcagctccccttcttcttcctcgaaacaaaggcctccttccttcttaggtgtttgagacaaattctccacacaggtgcagctgagtgctgtaaagtcccactgagagttgaaggtccccactgccagtcacagttcggtcccactgagggttgaaggtccccactgccagtcacagtttggtcccattgagggttgagagtctccactgccagtcacagtttggtcccattgagggttgagagtctccactgccagtcagtttgggcttattagggtttatgctgtgcacggagaatggaacctaccaatcaactcttagtgaccagttagacagattcaaggcaaatttccctgctgggaaatcccaaatcccaaaatatgcagagaccaatagatgcctcaattcttccgtgtctccgtctaaatccttgggtcactgtgactcctgtagttatgtggcttgtaattccttgggccgtagaatggctatgataggccctgtgctaaggggactggtgacagttgagacaggaacatggaagctatagtagtcagggttctccagaaaaaaaaataatcaacactaataatgatagatatatagataatgattgatagacaaataatgatagatatataatgatatcacaaataatgatagacatatagttggataatgacagatatataatgattgatacacagatagggtatttatatattggcttatgcaactatgtagactgacaggtcccatgatctgccatctgcaagctggagacccaggggagtccacgtgtagttccagtctacgtgcaaaagtctgagaaccagtagagttagtggtatacgtaacagtccaaaagctagcaggctcatgccgggcatgatggctcacgcctgtaatcccaacactttgggagaccaaggcaggcagatcacctgaggtcagagttcaagaccagcccggccaacatggtgaaaccccatctttactaaaaatacaaaaattagccgggcatagtggcattcgcttgtaatcccagctactcagaggctgaggtacgagaattgcttgaacccaagaggtgaaggttgcagtgagccgagatcatgccacagcactccagcctgggtgacagagtgagactctatctcaaaaaaacaaacaaacaaaaaaagctggcaggcttaacatctaaagagtcaatgttttagtgagagttcaagagccagaaaagactgatgtccaggcaaaaggaacttcatcttacattaccagttcaatgttttgttctattcaggtcccacctgattgaatgaggccgactcacattagggagagcaatctgctttataaattacactaattccattgataatctcattcagcaacacccccacagacacacacagaataatgtttaaccaaatatctcagcaccccatggctacgttaccattcctgttccacaaaaggaggaaacaaaagaacaaaaccacaccaaatgttgtggtaagttgacaaaatctgttccagcccattagtaaatattggccactgaagttcctgaaattcaacaattagtaagtatctctctcccaatagaaagccacgtcatttgtaaaccataacaatagcttttgtttttttgagacacagtctcgctctgtgttgcccaggctggagtgcagtgatcttggctcactgcaacctctgcctcctgggttcaagtggctctcctgcctcagccttccgagtagctggaattacaggcacccgccaccacacccaagtaattttttatatttttagtagagactgggtttcaccacattgaccaggctggtcttaaattcctgaactcaagtgattcacctgccttggcctcccaaagtgctgggattacaggcatgagctactgcacccagccaacaatagtatttttaattaggtcatcctgcctttacaatctctgcattttaaatactcaactaagagtacagccattatttgtctttcacccaaagtcccattcaagtgagaacaaaggaatgaataaataaggcataagtaacaaaacaacaaaaaaagaaaattagaatgcggtcaatttcatgcaatcatcaacaccaaatttccagaacgtagtatttccaaatttcccgaacgtaaatatgtatgtggaaattaacaaaatgtggcaaaacaaaaggtcacttaaatttgcacaaatgaaacagtcaacatggaagctgatcggctttctgaaatatgggacaagctcaggacttcaaaatacttcg[187 bp omitted]tggtggcggatgcctgtagtcccagctactcgggaggctgaggc[131 bp omitted]gtagaaggtttaattaggaatatttcactctccatacctgaagaattcgtgatagccaggagtctacaatcaaaataacataaataataagataaaaataaaattaatttgaagccataaaaaaagaatgagttcatatgttttgtggaaacatggatggagctggaggccattatccttagcaaactatacaagaacagaacaccaaatacagcaggttctcacttataagtggaagctaaataatagaactcatgaacacaaaaaagggaaaaacagacaatggggtctcctttagggtggagggtgggaggcgggaaaggagcaggcaaagtaactattaggtaccaagcttattacctaggtgatgaaataatctgtacaacaaacccccatgacacaagtttacctgtataacaaaccttcccatgtacccttgaacctaaaataaaagttaaaaaaatactcaatgagcaacaatgtacattatttgaggataattatattaaaagcccagacttcaccactacacaaaatatccacgtaataaaatttcacttgcgctccttaaatttatacaaataaacaaaaaagtataataaaatagtagattctttctttagagatgacaaatagtgccagagaaaatgcctccacactctggcattgagatcatctccaggataagggtatactgcatgcctggtcaagtccaagtaaatatactcagaccatgaatctcagagatgaaacataggttcagaacagacaaagccacagagcttttgactaatggcccagtgaaggcaatgtctgcctgtatggtatccaccaccttatattctgtcccaagcccgtctatttggatgtagcatctggttcaaagatgaatttgaacaccattagacactggcttaatgaaaattcacttctcattcgtttctcatctgaaacataaatagaaatataggtcttaggcaggaggatttcttgatgccagaagttagagactaccctggccaacatagaaagaccccatctctatttaaaaaaatatacatatatatgtcttctcttgggctccacccaagagcaacctggaactaagttattcggcaacgaactgttccactttgttgtgaggcaatagatgtggaaattccctgacgaggggctctgtcctcatacttcctgcggagcttattgtcgtaagaatatctgtcatcctgctaatgtgcattgaaaggagagcaacggggctgaggccgtgtcagcacgatggaccccaaacagaccaccctcctgtgtcttggtgagtttcagagtaaaagtgggttagaggggaagatagagaaatcccaaaataatcagggtgtctcttaacagtgtgactaggagattttagtggctgccaaggagattctgatctccttagtggaaaggccgtctttgtcaatgtatctataactttgtctctacccaagcccaagctagcttgtggggctcaaggtttaatatttgtattaaacctatagtgtgttatctgggattcatgatggtcccaaggttcttatcaaggagagacttagaggctggaatctgaaaggtaaaaataaagaatgaacctcaaaactgtgattgttgtggaaggaaaacatatgatagaaccccatatagaaatatggttactagtattttgttgaagatttttgcatttatgttcaacaaagatattatccagaagttttctgtttttgttgtatctctgccacattttgttatcaggataatgttggcctcatagaatgagttggggaggagtccctcctccaggatttttttcaatagtttcagtaggaataatactagctcttcttggccgggcgcagtggctcacacctgcaatcccagcactttgggaggccaaggcaggcggatcacaaggtcaggagatcaaaaccatcctggccaacatggtgaaaccctgtctctactaaaaatacaaaaaaattagccaggcgtggtggcgggcgcctgtagtcccagctactcgtgcggctgaggcaggagaatggcatgaacctgggaggcag[131 bp omitted]gtactggtctttttctggtctgtcattacagagggtgatttgtcgtaaaggttggaaatggaagcttgatttttcataaatctctctcttccagtgctctgtctgggccagaggattcaggcacaggaaggtaagtgtcctgtaaatctctcccagcccctttagaccctcttgggagctctaggataaagaaattgaagaatagcctgaagcaccattcttattttaatccccattctagttgtttctgctgtgcttctcttgcataatttctatctcactttgttatctccaaacccttcagactcattaatgctcaggcctggatttatagttagtccttgcctgtgttagactgtccatgaaggatctgtaatttactgaatgctcaaactgcaagaatgaggaagtcaggagtcatctgcccaatatccttccttatgctgattctattttgttttagcaacccacttcctcccgtcacttcatttaaaaggatgctgccatagtctaaccctactgaacactctagcattctgtagtactactgcagtactaagcatgaggcagtcttagtgtactactgaatattctgccaccccaactactactgccttagcctcctaatgggtgtgagccccacgtccatccatgtcttctctcttccagctccttctaaagcctgaattatttgtgtgttgaacaatactcattcttcctatccatgagcatggaatgtttttccatttgtttgtgtcatctatgatttctttgaccagtgttttgtagttctccttgcagagatctttcacctccctggttagctgtattcccaggtattttattctttttgcagtaattgtgaatggattctattcttgatttggctctcagcttagatgtttttggtgtataggaatgctactgatttttatatattgattttgtatcctggaactttgctaaagttgtttatcagattaagaagtgtttgggcagagactgtggttttctaggtatagaatcatatcacctgcaaacagggatagtttgacttcctttcttcctatttggatgccttttatttctctcttgcctgattgctctagctaggacctccagtactatgttgaacagaagtagtgagagacggcatccatgtcttttgccagttttcaaggggaatacttccagcttttgcccattcaatatgatgttgactgtgagtttgtcatacatcattcttattattttgaaatatgtttcttcaatgcctagtttgtcgaggttttttagcataaagggatgttgaattttatcaaaagctctattgagaggattatgtgtgtggggagggttgttctatttatgtgatgaatcatatttaagatttgtgtatattggccgggcactgtggctcatgcctgtaatcccagcactttgggaagccaaggcttgtggatcatgaggtcaggagatcgacaccatcctggctaacacggtgaaacctcgtctatactaaaaaacacaaaaaaattagccaggcgtggtggtgggcacctgtagtcccagctgctcgggaggctcaggcaggagaatggcgtgaatccaggaggcggagcttgcagtgagccaagttcacgccactacactccagcctgggcaacagagcgagactcctatatcgaatcaaccttgcatcccagaaataaagcctacctgatggtggtggattagctttctgatgtgctgctggatagtttgctagtattttgttgaggatttttgcatttatgttcaacaaggatattgtcctgaagttttctggttttgttgtgtctctgccatgtttttgcatcaagatgatgctggtctcatagaatgagctggggaggcattcctcctcctgaatatttttggaacgtttcagtaggtatagtaccagctcttctttatatatcagatgggattcagctgtgagtctgtctggtactgggctttttctggtctgtaggatttttattactgattcaattttggagctcattattggtctgttcatgtattcaatttattcttggtttgatctcaggagggtgtatgtgtccaggaatttctccatttattctggattttctagtttgtgtgcatagaggtgttcataatattctctgatgattgtatttctgtggggtgagtggtaatataccctttgttgtttctaattgtgtttatccggatcatctctcttttcttctttattagtctaactagtcatctgtcttactaattttttcaaaaattctactcctcgatttgctgatcttctgaatgctttttcgtgtctcaatctccttcagctcagctctgattttggttatttcttgtttcctatgagctttggggttgatttcctcttggttctcttagttcctcttgttatgatgttaggttgttaatttgaactttttctagctttttgaagtgggagtttagtgctataaacttcccccttaacactgccttagctgtgtcccagagattctgctatatttacccaaaaattccagaacagactgcttaatttccatgcattgtacagttttgagtggttttcttagtatttattcctatttttattccactgtgctctgatttcgc[132 bp omitted]cctcagcctcctgagtagctgagactacaggtgcccgccaccc[131 bp omitted]caccgtgcccagcctgctaaggattgctgtatgtctgattgtatgattgactttagagtatgtgccatgaggcaatgaaaacaatgtagattctgttgttttgggggtggagagttctgtagatgtctgtcaggtccatttgatccactgctgagttcaggtcctgaatatctctgtttgcctcaatgatctaatactgtcggcgggatgttaaagtctccccctattattgtgtggttgtctaagtctcttcgttggtctctcagaacacgctttatgaatccgggtgcttccatgttaggtgcatatatatttaggatagttaggtcttcatgctctttttttaattttttttttctttttctttttgattcagcagttgggctattacacactccttagcagattccgacttccgtggccactgtcctgctatggtcttcatgttgaattgaaccctttaccatgatttaatgcccttctttgccttttttgatctttgttggtataaagtctgttttgtctgaaattttaatagcagctcctgcatttttttttttttttggctttccatttgcttggtagatttttctccatttctttactttgagcctatggatgtcattgcatatgagatgggtttcttataggcagcataatgttgagtcttgcttttttttttttttttttttttgagatggagtctcactctgtcacccaggctggagtgcagtggtatgatcttgactcactgcaacttctgcctcccaggttcaaatgattctcctgcctcagcctcccaaatagctgggattacaggtgtgtaccaccacgcccagctattttttttttttattagagatgggatttcatcacattggccaggctaatgtcgaactcctgacctcaaatgatccacccacctcagcctcccaaagtgccagggttacaggcgtgagccactgcacctggcctcttgcttctttatccaacttgccactctctgcattttaattaggacaattagtccatttacattcaaagttagcatttacatgtgcagattttttcctgtcatcatgttgttagctggtttggttattatgcagacttgtttgtgtggttgttttatagtgtcactggtttatgtacgtaagtgtgttttctattggctggtgatggtcttttctttccatatttagcgttcctcttaggacctcttgtaaggcaggcctgatggtaataaattccctcagcatttgcttgtctgtaaaggatcttatttctccttcacttatgaaacttagtttggctgggaatgagattcttggttggaaattcttttcataagaacattaaatataggcccccaatctcttctggattgtagagtttctgctgaaaggtctgctgttagctcgatggcattccctttgtaggtgacctgccccttcttttttgctgccttttcacatttttttttttttttttgagactgagtcttgctctgttgcccaggctgccaggctggagtgcaatggcgtgatctcggctcactgcaagctccgcctcccggattcacgccattctcctgcctcagcctccccagtagctgggactacaggtgcccaccaccacgcccagctaattttttatatttttttagtagagatggggtttcaccatg[137 bp omitted]tttgtgtcttggggatgctcttcttgtgtagtattttgcaggggttctctgtttcctgcatttgattcttggcctctctagtgacgttggggaagttttcatgaacaatacactgaaatatgttttccatgttccttgctttctccccatctctttcggggatgccaatgggctatttggtctcttttcatgatcccatatttcttagaggttttgttcattaatttttattctttttcttcatttttgtctgactgaattagttcagagagccagtattcatgctctgagattctttccttattttgctttattttgccattaatacttgtgatcgcattatgaaatctcgtagtgtgtttttcagctccatcagatccgtttggttctttcaaaatgaccatctcatagattagcccctctgtcattttattgtaatctttaggttccttgcattgggtttcaactttctcctgaatcttgatgaccttaatttctatccatattctgaattctatttctgtcatttcagccaggtaaagagcccttgctgggaagcttgtgtggtaatttggaggaaggaagacactgttgctttttgagttgatggagttcttgctcagttctttctcatccatgtgggctaatgttcctttgagtgtgctgcaatttgaatttttttcttttttcttttaaccgtgatgtaatttgagcacagtcagtagacttcttttctggatggtttcagagggctggggcttcgcacagggtctttatttatagctaaattcttgtccttggtttcacagggaggtatattagcgagcatttttggtgttgaagtttgggctgcaatccggtaaatgatgcttcagcacaacggccagtaggtcattcctcatgattgccgctgtgctccctctcacgctctgaaagtgcgggctcctctcccacccaagtgctggctgcagatctgggctcggcactcccaggctgcacatcacagctctggggtgagctcagactttatgttccctccgtggcttgggggcagcaggggaagggaccttagcagcggttgtggcagacggcctttcacttgtcccttggaactccaccccagagagatgtggagccactatcagtgcgatgagccaagagtgaggcgactgcactgtgggtccaagctaggggccctgcctagtgatgagcaggggggacaggtgggtcacaggggtgacagactggcctcttctccttagggcagtttgccggaggtgtggttgaagcactcagagtctttgctccttccccagtctgagggcagcaaggccagtaccaccgcagtggcagcggcagagtgaccttccgttgcctctgggagctccgccacagagaaacgcagactcacagctgctgggaacgctccgccagagggtggggctgttgtgccgcggaatcaagctggggcttgttgaagagcagggggttgagggctcacagggagaggagactgagctcctctccgtatggcgactgcggtgtgctggaagcatgaatgaaggccgggcgcggtggactcacgcccggaatcccagcactttgggaggccgaggcgggcggatcacgaggtcgggagatcgagaccatcctggctaatctggtgaaaccccgtctctactgaaaacacaaaaaatgagccgggcgtggtggcgggcgcctgtagtcccagctactcgggaggaggatgaggctgaggcaggagaatggtgtgaacccgggaggcgcagcttgcagtgagccgagatcgggccactgcactgcagcgtgggcgacagagcgagactccgtctcaaataaataaataaataaataaataaataaataaataaataaataaataaattgaagcatgaatgaaggccccaggctccttgcttcttccccagatcacgggcagcagaggcagaacccttgccatggcagtggcagaggggctgtcagttgcctctgggagccactccccagggaaacacgagccaccaccagtgagtgtgctgagggcggggcagctgctctgcactcccgagctgggggctctgcctggtaaagtgggggtgggagctcacggggaagagagactggactcctctctgtctgatggctgtggcataatgaccgggcccccacacatgaaaaagaattctgggaactcaaaaagccagtgtgtccccaccatggaccccttggattgtgtttcaaatttctcctcaatttcgaagagcgtcctggccatccagattctgaattctataaccctcgtttcattcatctcaatgtagctaagaaccagatttctggggaactatcgagttgccagagttcttgtgttgattcttttttttttttcttttttttttcttttttgtggcagagtcttactctgtcgcccaggctggagtgcagtggcacgatctcagctcactgctgcaaccttcacctcccgggttcaagcgattctcctgtctcagcctcctgagtagctgggattacaggtgtgtgccaccacgcccggctaatttttgtatgtttagtagagcccgggttttgtcacgttggtcaggctggtctcaaactcttgacctccggtgatctgcccacttcagcctcccaaagtgctgggattacaggtgtgagccaccgcgcccggccttggtgttgattctttctcttgtgtgagggctggtgttcctttaactgtgatgtcggttgagtacagtcgcttggcttcatttctgggtgttttcagatgccaggactctgcacaggatctttatttgtggctgaatttttcccttcattgtatactggcaaaatttttcagtgttgtattttgaagtgtgatccagtaggtggcacttaaaagggttggccagcatacaggatcttagccacaaggctcttttgtagttttgtttcgttttttgtttcgttttttgacacagggtcttgttctgtcgcccaggctggagcacagtggcacaatctcggctcactgcagcctctacctatcaggctaagtgatcctcctgcctcagcctcctgagtagctgggactacaagcacgcagcaccataaagagaaaatttttgtaattttttttttttttttgtagagatggggtttcaccatgtttaccaggctggtctcaaactcctgggctcaagcaatctgcctgccttggccccctaactcttgtattttgacaaagtcggcagtagtgctctgtggttgtgaggaggggtgactccctcgcctggtccattcttgggccttggaggagcctcctacagtcactggctctgcacccactgtttcctttgttaggattgttctgcccacggggctccctcaggcagggcatggtgggcagacaggctgtatccttccccggccagccctatggagggaggaccaccccgcacctctgcaggctgatgaaatcaggtgtttcacccctctgaacgttctgagaatgagggctcctcacggcttggtcgccacctaacgtggtgagtccttctcagcaagggtgattggagccacatgatctgccatctcagtgcttcccaggggaacacagagctactgggcatggtggctcacacgtgtaatcccagtactttaggaggc[137 bp omitted]tgaggcagaagaatggtgtgaacccgggaggcggagcttgcagtgagccaagatcacaccactgcactccagcctgggcaacagagtgagacttcatctcaacaaaaaaagaaaagaaaagaaaaacacagagctgcacaccccacagagttcaggcagaagggggtctgcagcgctggaagacccagcaagcctggcccgtctggctgcaagtggcaggggtgggtggagtcacccacttcaccatctgggtgctttccagggaagcatgcagccacgaccccgggcagagttcaggcagaagctgggccactatgctggaaactggccttgagccttgtggagtaacggcaggtggagccatctcactgctcccacgcaccatgcccgtggcctctgcgggggctgtggtaacggcacccgactgctctggggtcaatgcctgcggaggtccccctggcttcagtgttgcctctgcaaaaaccccagttgcagccaggtgcggtggctcacgcttgtaatcccagcactttgggaggccgaggcaggtggatcacttgaagtcaggagttcaagaccagcctggccaacatggtgaaaccccgtttctactaaaaatacaaaaattatccaggcatggtggtgggcacctgtaatcccagctactcggaaggctgaggcagcagaattgcttgaacccgggaggcggaggagctgagattgcaccactgcactgcagcctgggcgacaaaacaagactctgtctcgaaaaataataacaataaaaaataaagatggcaaccatagacactggagactactagatgggggggaagaaagggggttgaaaaactgcctattgggtactatgctcagtacctgggtgacaggatcaatcgtactccaaacctcagcatcacaaattatttaaatttttctctttttttaatttttttgttgttgttgttgagacgaagtctcactctgttgcccaggctggagtgcagtggtgtgatctcggctcactgcaagctctgcctcccaggttcacgccattctcctgccccaatctcccgagtagctgggactacacgcgcccgccaccacgtcctgctaattttttgtattttcagta[136 bp omitted]atggtaggttcttcacaccctaatgtatttttacttctcccacagagaaggaaaggaatggcttccccatggcaagccacctcagtctgggctttcttttcttccaggggactttcccatgcctttcatatctgccaaatcgagtcctgtgattcccttggatggatctgtgaaaatccagtgccaggccattcgtgaagcttacctgacccagctgatgatcataaaaaactccacgtaccgagagataggcagaagactgaagttttggaatgagactgatcctgagttcgtcattgaccacatggacgcaaacaaggcagggcgctatcagtgccaatataggatagggcactacaggttccggtacagtgacaccctggagctggtagtgacaggtaaggaaacatccagggtccacagccctggtgtgatttttttcttatttttaatagagtatttttcaagaagttttagatttacaaacaaaaaaaaattgatgattgcttcagagagttctcagccatctggcaccccacttcccccagagttaacatcttacattagtatggcacatttcttaccattaatgaacaaatatcgacacattcccagctacagtctacagtttatttacattttcttagtttttacctgatagtctttctctgttccaggatcccattcaagatttcacattgcggctgggagtggtggctcacgcctgtaatcccaacacttagggaagccgaggcgggtggatcacccaaggtcaggagttcgagaccagcctggccaacatggtgaattccccgtctctactgaaaatgcaacaatcgctgggcgcggtggctcacgcctgtaatcccaacactttgggtggctgaggtgggtggatcacctgaggtcaggagttcgagaccagcctggccaacacagtgaaacctcgtctctactaaaaatggaaaaaattggccaggcctggtggcacacgcctgtaatcccagctacttgggaggctgaggcaggagaatcgcttgaacccaggaggcagaggttgcagtgagccaagatcacaccactgcactccaggctgggcgacagggcgagactccatctcacacacacacacacaaaaagatttcacattgcattcaggtgtcatgtatctttatttttttttttttttttttttttgagatggagtcccgctgtgttgcccaggctggagtgcagtggcacaatctcggctcactgcaagctccaacctcccgggttcacgccattctcctgcctcagcctcccgagtagctgggactacaggcgcccgccaccacgcctggctaattttttgtatttttagtagagatagggtttcactgtgttagccaggatggtctcaatcttctgacctcgtgatccgcccgcctggcctcccaaagtgctgggattactggcgtgagccaccacgcccggcccccgaaaatgctgggattacaggcatgagccaccgcacctggcctcccaaagtgctgggattccaggcgtgagccaccgtgcccggcaggtgtcatgtatctttaggtttgtcttggctgtcacagcttctcagatgttgctggttttccatgaccttgtcagttttgagggtagtggtccattattttcaagggtactcccactactggaaattgtccgatgttttgctcatgactagactgagttatgggtcattgcaggcaagaccacagaagcaaagtgccatttcatctcctcatagcaaaggtttaaactgtccatgggaacatgactgtggatgttgagctggctgttgttgaaagcctggctgaagtagtaactgtggccagacaccgtggctcgtgcctgtaatcccagcactttgggaggctgggcgccgtggctcacgcctgtaatcccagcactttgagaagccgagatgggcagatcacttaagcccaggagaccagcctgggcaacatagtaagaccccatctgtacaaaaaatcaaaaaattagctgggcatggtggcacccacctgtagtctcagttacttgagaggctgagatggtaggatcacctgagcctgggaggtcgaggctgcagtgagccgtgattatgccactgccctcagcctgggcgacagagtgagaccctc[131 bp omitted]catggagaaacctcatctttactaaaaatacaaaaattagctgggcgtggtggcgggtgcctgtaatcccagctactcgggaggctgaggcaggagactcacttgaacctcggaggtggaggttgcagtgagctgagatcgtgccactgcactgcagcctcagtgacagagtgagactccatctcaaaaaacaataataggctgggcacagttgctcatgcctgtaatcccagcactttgggaggccaaggtgggcaaatcacctgaggtcaggagttcgagaccagcctgaccaacatggagagaccccgtctctactaaaaatacaaaaattagctgggcgtggtggtacgcacctgtaatcccagtttctcgggaggctgaggcaggagaattgcttgaacccgggagacggaggttgcagtgagctgagatcacgccactgcactccagcttgggcaataagagcgaaactccatctcaaaaaaatatataataataacaataataagaagaagaaaagaataaaggagaaaaggtctttctaatagctcactcttttctctcttaggcttgtatggcaaacccttcctctctgcagatcggggtctggtgttgatgccaggagagaatatttccctcacgtgcagctcagcacacatcccatttgatagattttcactggccaaggagggagaactttctctgccacagcaccaaagtggggaacacccggccaacttctctttgggtcctgtggacctcaatgtctcagggatctacaggtgctacggttggtacaacaggagcccctacctgtggtccttccccagtaatgccttggagcttgtggtcacaggtaggtaccgcccagtccagccctgtgtctgggttggctgtccagggccttgccaccgggcaggaatatgaagacgtgcactgagagtgaagtgaagagaggcaaaggctctcactccaggacagtggagagagaaaggcttccccaccacactttccgctttcacttcctcgctagagttctccagacagggttcattgaaaacttagtctgtggagaacagaagggctaactcagtttgtttcattttatttatttcattttattttccgggatagagtcttgctctttcgccaaggctggagtgcagtggcacgatctcgactcactgcaaccttcgcctcccaggttcaagcaattctcctgcctcagcctcctgagtagctgggaccacacagacagggtttc[145 bp omitted]ttgtagagatgtgattaggtatttagtgaattcaccaagtgaggagagaatgaaaagaaaacacaacctgcctggccgggcgtggtggcgtgagcctgtcgtcccagctactcaggaggctgaggcaggagaatcacttgaacccaggaggcagctgttgcagtgagccaagatcacgccattgcactccagcctgggtgacagaacgagactccacctcaagaaaaaaaaaaaaaacatggttgggcacgatggctcacgcctgtaatctgagcacattgggaggctgaggcaggtggatcacctgaggtcgggagttcgagaccagcctggccaacatagtgaaaccccatctccactaaaaatacaaaaattaaccaggcgtggtggtggtgggcgcctgtaatcccagctacttgggaggctgaggcaggagaatcacttgaccagggaggcggaggttgcagtgagccgagatcacgccactgcactccagcctgggcaacagagtgagactccatctcaaaaaaaaaaaaaaaaaaaaacacacacaacctgcccataatcacctccttcccagtttatagcacttccctgggaagcacagttccttgcccgtgaacacagtcttgctgactgatcagtgtggtgctggcgaagcatgagctcattgaggggatgcttgagggagtcccattttggcaagcgaaaaggaaaatgagctcccgtttcagggctctggggttgggatggaatggaacacaaccaccaaccattcatctccttgaattgtgtctccagactccatccaccaagattacacgacgcagaacttgatccgcatggccgtggcaggactggtcctcgtggctctcttggccatactggttgaaaattggcacagccatacggcactgaacaaggaagcctcggcagatgtggctgaaccgagctggagccaacagatgtgtcagccaggattgacctttgcacgaacaccaagtgtctgcaagtaaacacctggaggtgaaggcagagaggagccaggactgtggagtccgacaaagctacttgaaggacacaagagagaaaagctcactaagaagcttgaatctacttttttttttttttgagacagagtctggctctgtcacccaggctggagtgcagtggagcaatctcggctcattgaacctcttgggttcaagtgattcttgtgcctcagcctcccaagtagctggaattacaggcacataccactgcacccagctaatttttgtatttttagtagagatggggtttcactgtgttggccaggctggtctcgaactcctgacctcaggtgatccacccaccttggcctcccaaagtgctgagattataggcatgagccaccacgcctggccagatgcatgttcaaaccaatcaaatggtgttttcttatgcaggactgatcgatttgcacccacctttctgcacataagttatggttttccatcttatctgtcttctgattttttatatcctgtttaatttcttccttcattgttcttctctttttttatttattttatttatttttatttttatttttatttgagacagagtctcactctgttgcccaggctggagtgcagtggcacgatctcggctcactgcaacctctgcctcctgggttcaagtgattctcctgcctcggcctcccaagtagctgggattgcaggctcccaccatcacgcccagctacttttacagtatttttagtagagacggg[134 bp omitted]cccaaatataaatggttggtaagcatgccaaatatattcaataacccccctcctttatttttttttgttgaagtgaggctctccctatgttgcctaagctggtcttgaactcctggtctcaagcaatcctcctacctcagcctcctgctgtgttcatctacaaattgataagagtgaaagtcataatcctacaggaggattaccctatttatttcacaaaccctatttctaccggattttcatacaaggaatacaggcatgtgtttcacctcattaatttattttttcacttagttttgatgatattcacatatattatcaagtgtgcaaacattaaattcttgtgtacaaaactcaaatggtcttccaaataattccccattcttttttcttataaactttcacagctttacccttgacagactttactcaaggaaatctaagttggtcatatgtggctctttcactgattgctatttacttcattgtccagtagcttatgtatgaaaatataattataaaatgtaagggtcctacttccagtgaaactgaagggacttaggcccacttttatcctttactgagagcttatctctacttgataaaatttctactgtattcttggcttaactcaggtcctgtgattaaaaaaaaaatgcaaagtatttctaactttctttattgactgcttttcacactttatacaagttctggcccatatcttcagtttgttctgatttttttcaccaggtgtggtggcaggtgcctgtagtcccagctactccaggggctgaggcaggagaatggcgtgaacctgggaggcggggcttgcaatgagctgagatcacgccactacactccagcctgggccacagagcgagactccgtctcaaaagtaaacaaacaaataaataataaataaataaataaagggaaagtgccacaattttggatgaagggggttgagggactttacgtcaggtccaggacttggattacagagacacaatggggctagattcccagagatggataagattaaactcatataagtcgttttgctgacagaaggaccttgtttggaaaaagcgttttcagaataataaagttcctgagctcttcagaaaagtattttattgtcctgtaaccacagtaacaagtagccaccaaaactgatttttaacccatcatcaatgacaactcatctctgtgaagatgctctttttttttttttttttttttgagacggggtcttgctctgtcacccaggctggggagcagtgacgtgacctcggctccctgcaacctctctttcccgggttcagcaattctcctgcctcagcctccccagtagctgggattataggcacctgccaccacacgcagataatttttgtatttttagtacagacgggtttcgccatgttggccaagctggtcacaaacttctgacctcagggtgatctgcctgcctcagcctctcaaagtgctgggattacaggagtgagccacaaagcccggccactccatacgttttatattgttatgttaccatcagtcaggcagctccttgcttctaaaagtcatccaatcagactcatttcagtaaacacccaagcatgagtgacaaccaatcaaagtaatatcttcccaatgaccacacttttccagatgacgtcaagccacagaaggccctgaaaatccaacaatctctgaagtatacatttcccaggctgagcgcagtggctcacacctgaaatcccagcactttgggaggctaaggcaggcagatcacgaggccaggagttcgagaccagcctggccaacatggcaaaaccccgtctctactaaaaatacaaaaattagccaggtgtggtggcacgcacctgcattaccagctactgaggaggctgaggcaggagaatggcttgaacccaggaggcggaggttgcagtgagccaagatcgtaccaccgcactccagccttggtgacagagcaagactccatctcaacaacaacaacaaaaatggttgaaataaaacttctatgtgttgaacgattcctcttttaggcatagagtttcagttttacaagatgaaaatattctggagatctgtttcaaaacaccgtgaatacatttaacactgctatactgtacacttacaatggctaagatggtaaattgtatgttatgtttttactacaatttttttttttttttttctgagacagagtctcactcttgttgcccaggctggagtgcaatggtgcggtctcggctcaccgcaacctccgcctcctgggctcaagccattctcctgcctcagcctccagagcagctgggattacaggcatgcgccaccacgcctggctaattttatatttttagaagagacggggtttctccatgttggtcaggctggtctcgaactctggacctcaggtgatccacccgccttggcctcccaaagtgctgggatcacaggcgtgagccaccacgcctggcctacaatttttttttaacttttttttctgagatggagtctcgctcttgtcacccaagttggagtgcagtagtgtgatctcggctcactgcaacctctgcctccctggttcaagggattctcctgcctcaacctcccaagtgtgggagatcagtcagagtagcagaagaaattataggaataggaagcagcaaaccttcttggaaggccagggaggttggcatagcttcagatagtttggctgaaagcagccagattctcttttcaggagccaaacagcttagggcgcagatacaaaggaatgcggagtattttatctaaatagcttgcttagtcatatggtcctaaaatcaacctttgatcattctcgggcaagatggccctctccagggaggtggcggggggcggtgaccaggttaattacccacaggtgtgttgactcaaagcctttgttaattaaatctgtgctaaataaatgcaagcgttgccagcttagaggggctgcactctctttggctcctagtgccggcagccccctggcctgctctttcactgaatattggtgtctgaggacgtgtctcatctgtcgtacagctgggatctgcagaacagatcccccccgcacccaagaagctgggattacaggcacccgccgccatgcccagctcatttttgtatttttagtagagacagggtttcaccatgttggtcaggccggtctcgaactcccggcctcaggtgatctgcccgcctcagcctcccaaaagtgct[132 bp omitted]tcccaggttcaagtgattcccctgcctcagcctcccgagtagctggaactacaggtgcgcaccgccacgcccggctaatttcttgtattttcgtggagacggggtttcaccatgttggctaggctggtctgtttcatgcgcgtccgtgtgaagagaccaccaaacaggctctgtgtgagcaacaaggctgtttatttcacctgggtgcaggcaggctgagtccgacaagagagtcagcgaagggggataggggtggggccgttttataggatttgggtaggtaaaggaaaattacagtcaaaggggggttgttctttggtgggcaggagtggggggtcacaaggtgctcagtaggggagcttttgagtcaggatgaaccagaagaaggaatttcacaagataatgtcatcagttaaggcaggaacaggccattttcatttctttcgtggtggaatgtcatcagttaaggcaggaaccggccatctggatgtgtacgtgcaggtcacaggggatatgatggcttagcttgggctcagaggcctgacattcctgtcttcttatattaataagaaaaataaaacgaaatagtggtaaagtgttgggatggcgaaaattttggggggtggtatggagagagaatgggcgatgtttctcagggctgcttcgagcgggattaggggcggcgtgggaacctagagtgggagagattaagctgaaggaagattttgtggtaaggggtgatattgtgggattgttagaagaaacatttttcatttagaattactggtgatggcctggatgcagttttgtatgaattgaaaaactaaatggaataaggaaaggagaaaaacaggtattaaaggtctaagaattgggaggacctaggacatctaattagagagtgcctaaggaggttcagcatagccttgccagcaaagattatttatttacttcaagagttaagagtggtggtttggggatagcaccaggagatatcagctgtgatggcttggaaaaacagtgtaaaccagcagtgtaaacaagagcagggcatgtgtgagtagttgagaatggtgaataggagtatgactagacagaagatagtagggatgacaagtttttgggggcacattccaagttggtctggtgtctggaatgagactggggcttaataaaaaggagcgtctatacaggagctcaaatgggctgtaccctttagcattctgaggacaggcctgaattctgagaaaagaaagtggtaaaagtattgtccagtcttttttaagttggtggctgagcttggtgaggtgtgtttttaaaagactattagtctgttctacttttcctgaagactgaggactgtaagggatataaaggtttcactgaataccaagagcctgaaaaactgcttggctgatttgactaataaaggccggtctgctatcagactgtatagaggtgggaaggccaaactgtggaattatgtctgacagaagggaagaaatgacctcggtggccttctcagaccctgtgggaaaggcctctacccatccagtgaaagtgtctacccagaccaagaggtattttagtttcctgactcagggcatgtgagtaaagtcaatttgccagtcctaggcgggggcaaatccccgagcctgatgtgtagggaagggaggggacctgagcaatccctgaggggtagtagaatagcagatggaacactgagaagtggtttccttgaggatagatttccaggatggaaaggaaatgagaggttctaagagatgggctagcagcttgtaacctacatggaagaggctatgaaatatcgaccgaatagaatgggcctgtgaggctggaaggaggtattttccttggtctaagaaccatttgccttgtgtgggaagagattgatgggtggaagtttcagtgggggagtaggtgggagtgactgatgagaaggagaaaaactggctgtgggggacagaaattggcatgctagctgcttgtctagctaccttatcagcataagcatagatgtgagagacagaagttggaaagctagctgcttgtctagccaccttgtcagcataggcattgtctagagcaatgggatctgatgacttttgatggcctttgcagtgaatgactccagcttcctctgggagtaaagcggccttgagcagagtttttattaaggaggcattaaagatggaggacccttgtgtagtgaggaaacctctttcagcccatatgaccgcatggtggggcagaatatgaaaggcatatttagagtcagtataaatattgatgcatagtccttttgcatcagtgagggcttgagttaaggcaactaattcggcttgctgagaggtagtggagggggcagagcggtagcctcaatgatagatgtggaagatactatagcatagcctgcctttgctggtgagtggcgattaggcctggtggaactgccatcaataaactaaatgtgattagggtgaggaataggaaagaaggaaatgtggggaaatggggtgaatgtcaggtggatcagagagatacagtcatgggggtcaggtgtggtatccggaataatgtgggaggccggattgaagtatgggccagtaacaatggtaattgtgggagactcaacaaagagtgagtacagctgaaggagccggggagcagaaagtatatgcgtcaggtgtgaggaagaaaatagatttttggaagttatgagaactgtagagagtgagttgagcatagtttgtgattttgagggcctctaaaactattaaagcagcggcagccgctgctcacagacgtgagggctaggctaaaacagtaagatcaagttgtttggacagaaaggctacagggtgcggtcctggctcttgtgtaagagttctgaccacgctaaccatgcctaggaaggaaaggagttgttgttttgtagaaggtgctggggtttgagagatcactaggacacgattggcagggagagcacgtgtgtttttatgagaattatgccgagataggtaacagaggaggaagaaatttgggcttgactgaagtaatgggggctgtctgtgaagccttgcagcagtacagcctaggtaatttgctgagcttgatcggtgtcagggtcagtccaagtgaaagcgaagagaggctgggatgaagggtgcaaaggaacagtaaagaaagcatgtttgagatccagaacagaataatgggttgtagaggcaggtattgaggataggagagtatatgggtttggcactacggggtggataggcaaaacaatttggttgataaggtgcagatcctgaactaatgtgtaagccttgtctggttttaggacaggtaaaatgggagaattgtaaggggagtttataggctttaaaaggccatgctgtagcaggctttaatccttttaaagcatgctgtgggatgggatattggcattgagcggggtaaggttgattaggttttaatgagatggtaaggggtgcatgattggtcaccaaggagggagtagaggtatcctatacttgtgggttaaggtggggggatacaagaggaggacacaaaggaggctttggattgggaagaagggcagcaatgagatatagctgtagtccaggaatagtcagggaagcagataatttagttaaagtgtctcagcctaataagggaactgggcaggtggggataactaaaaaggagtgcttgaaagagtattgtctaagttggcaccagagttggggagttttaagaggtttagaagcctagctgtcaatacctacaacagttatggaggcaagagaaacaggcccttgaaaagaaggtaatgtggagtgggtagcctccatattgattaagaaggggacgggcttaccttccactgtgagagttacctagactgtctgtgatggtcctgtaggcttccgaggcgatcgggatcgggcagtgtcagtcttcagctgctaagccgagaagatctgggaaggagtcagagagccttgggccagagttctagctgctctgggagtggctgccaggtgagttgaacagtccgattttcagtggggtcccgcacagatgggatgcggcttaggaggaatcccaggctgtggacattccttggcccagtggccagatttccagtacttgtagcaagctcctgggggaagaggttctggaggaacccctggcagctgcggttcaggcgtttggagttctcgtgtgctggagatgtggctggggtttgtctcatctggatactggagtggaggcaaggaattgcaactcagaaatatgttgctatttggctgcctctactctattactgtacaccttgaaggcgaggttaattaagtcttgttgtggggtttgagggacagaatttaatttttggagctttatttaatgttgggagcagatttggtaataaaatgtatattgagaataagacggccttttgacttagggtctagggctgtaaagcgtctcagggttgctgccaaatgagccatgaactgggctgtgtttttaaatttgatgaaaaagagcctaaacactatctgatttgggagaggtcagataaagaaaaaggagcattaaccttgactatgcctttagcttcagccacctttttaagaggaaattgctgggcagttgggggagggctagtcatggaatggaactgtaagctggaccgggtgtgaggaggggaggtgataaaaggattatagggtggaggagcggaggctgaggaagaattgggacccagctcggcctggcgaggaggggagatgtcagatgggtctgtagaaaaggaagattagaaagactcagcgatgcttggggttgggactgacgggacaggcgggagggaaagaaggaagatttgggacgagttgcactgggcatagagactagggagggaccgatgtgtaaaagaatgcctggatgtcaggcacctcagaccgtttgcccattttacaacaagaattatttagatcttgtaggatggaaaaattgaaagtgccgttttctggctatttggaaccactgtcaagtttgtattggggtcaagcagcattgcagaagaaaataaggcatttaggttttaggtcaggtgtgagttgaagaggttttaggtttttaagaacacaggctaagggagaagaaggaggaatggagggtggaaggttgcccatactgaaggaggcaagcacagagaaaagagagagtagagacatggagggaaggggttcaggggttcttaccttccagaaaagcgggaaaggggtcagggcacagaagtaagggattggggtgcagagacaagaggtcggggtgtggaaataagggatcggggtgcagagataagacgtcagggcacagaaataagggatcgggggattcttgccccctagaaaagcggtacttgccactaagggtgaaggagaaggggttggggggttcttgcccccccagaaaagcagagaaggggtagagacacagagaaggagttgggggttcttgcccccccagaaaagcagtacttgccactaagggtgaaggaccaaggcaggcatccccatgtggtcagacacctctgaaacgtgggtgaataatcagagaggtgtccccgcgtgattaaacaccaagggaaggctgccttcccgagtccatgaccggcgctggagttttgggtccacgaataaagcgcgtctcctgtctctaccagaaaaggaaaggaactgaaattaagagaagggagagattgaagagtggaaaggagaaagtggttgagggatagtgagagaggttggagaagagagtaaaaagaggctgcttactggatttaaaattggtgagatgttccttgggctggttggtctgaggacgagaggtcgtaggtggatctttctcatggagcaaagagcaggaggacaggggattgatctcctaaggaagatcccctgattcgagttatggcaccaaatttcactcacgtccgtgtgaagagaccaccaaacaggatttgtgtgagcaacaaggctgtttatttcacctgggtgcaggcgggctgagtccagaaagagagtcagcaaagggagataggagtgcggccgttttataggatttgggtaggtaaaggaaaattacagtcaaaagggggttgttctctggcgggcaggagtggggttcacaaggtgctcagtaggggagcttttgagccgggatgagccaggagaaggaatttcataagataatgtcatcacttaaggcaagaacaggccattttcatttctttcgtggtggaatgtcatcagttaaggcaggaaccggccatctggatgtgtacatacaggccacagggggatatgatggcttagct[132 bp omitted]gttatgtgtattttgccacaatttttgaaaagtaccttctggtgtttagagacagaagatgagtggttgcctagggccgggagagtgaggggatcgtggtgatgggcagctggtcggcatggggttctgaagggcagtgatgacaacattctaaaattagactgtgttgacggttgcaccaactccgtgaataccacaaaatttaaaccattgaattatgcacttttaatgggtaattgtatggcat[146 bp omitted]gaaaccccatctctactttgaaaaaaaaaaaaaaagattacccggacgtggtggtgggcacctgtagtcctagctactcaggaggctgaggcaggagaatggcataaactcgggaggcagagcttgcagtgagtcgagattgcgccactcaggaggctgaggcaagagaatggcataaaccccggaggcagagcttgcagagagccgagattgcgccactgcactccagcatgggtgacagagcgagagtccatctcaaaaaaaaaaaaaaaaaaaaaaaagattagtaatatcctctgtgtcacttaccacttaagtgattgaatcacgacttgaaattcatcatctcaaacatggcttagagtctgtagaggggggacagtcccaggaatgctggtgtgggcttaaggctgaattaaatagatccagatggctcacacctgtaatcccaataccttgggaggccgaggcaggtgggaggctgaggcaggcggatcactggagctcctggagcgaagaaaggatgctagtggaaaaactggtgaaatcagaataaagtctatagttttattttttaaaggaggctgggcgtggtggctcatgcctctaatcccagcactttgggaggctgaggcaggtggatcagttgagttcaggagttcaaaaccagcctggccaacttgacgaaaccccatctctactagaaatacaaaaattagctgggcgtggttgtgggtgcctctaatcccagctactcaggaagctgaggcaagagaattgcttgaacccaggaggcggaggttgcagtgagctgagatcacaccattgcactccagcctgggctacagagcaagattccatctccaaataagagagacatgacaattaaataaattgtgtaatcttggattaaatcctaaaccaaatatatgtcactggtaaaacaagtggtgaaatttgaataaagtggatagatcagacaatagtgtcatatcagtgctatttcttgaccttgaacattaataacagaatgtccttggttttgggaaatataacctgaagtgattagaggtttagggcatcatatgcaaattagacacactttcttcggggagagagggagagggagagaggctgaatgatgaagcaaatgtggtaaaatgctaactttggggaaatctggatgaagaaattacagattttttttttttttatagacagggtaacactctgtcacccaggctagagtgcagtggcacgatcatggctcactgcagcttctacctccctgggctcagatgaccctctcacctcagcctcccaagtagctgggactataggcgcacagcaccacacctggc[131 bp omitted]tggaattatgtcaaaattaaaagctcaaaataataaaagacaatattcttatatttctttggtgaaggtaactatgttatggctgagagggtggctgaggtctgaggatccagcctacataagtctcctccatagagggcatccaagcgctccgtagggggaaggataaagaaaacacccagagttatgacagctgtgtaaggggaaacgcc[137 bp omitted]catggggaaaccctgtctctactaaaaatacaaaaattagtcgagtgtggtggcacacgcctgtaatcccagctacttgggaggctagaacaggagaattgcttgaacccaggaggtgaaggttgcagtgagctgagattgcaccactgcaccccagcttgagggacagagtgagattccgtcttaaagagaaaaaaaaaagaattagcacatttgtttgcctcaagaagatacaactagtcttgtacagtagtcacatgtatccaccaggatatattccaaggccccagtggatgctgaaaactacatagtaccttacatgtatatatatatgtatatacatatatacacatatacgtatatgtatacatacatgtatatatacatgtatgtatatacatatatgcatatatacatacatgtatatatacatgtatgtatatacatatatgtatatgtatgtatacacgcatacatgtatgtatacacgcatacatgtatgtatatacatatatgtatgtatacacggatacatgtatgtatatacatatatgtatgtatacacgcatacatgtgtgtatacatatatatgcatgtatgcatgtgtgtatatatacatatatgtgtatatatacgcatatacatgtatgtgtatatatgcatgtgtatatatacatgtacggtactatgcagtatatatacacatatatgtatatatgtatacatatatgtataaatgtatatatgtgtatatatataaaaggtatatatgtatatatgtgtgtatatataaaatgcatgaatttcttttttcttactgtagatcttaacaacttctgcatagaatttttttttattaagtggagagttagttacttacttaaaagaaatgtttcttggctgggtgtggtggctcacacctgtaatcccagcactttgagaggccgaggcaggaagattcacttgaggtgaggagttggagaccatcctggccaacgtggtaaaaaccggtctctactaaaagtacaaaaatgagctgggcgtggtgttgggtgtctgtagtcccagctactcaggtggctgaggcaggagaattgcttgaacccacaaggcagaggttgcagtgagctgagatcacaccactgcaccacagcctgggcaacagagcaagactctgtctcaaaaaaaaaaaaaaaaaagaaagaaaaagaaaaagaaaagaaatgtttcttttcttattaagttctttaaatgaaaagcttttcttttcacttttattttattgaaacattataacactatctttgaagaagatagtgttatcattccattctgatgaaaccaattaacttatccaagcatatgtatactgtacacagagaagccaacgtcaaaacccctatttttatctttttagattcagcagatacatgtgcaggttttttatgagtatattgcatgatgctgaggcttgcattaatgatctagtcaccaaataggtagattttcaagccttgctcccctccttacccaatgtttagcgctctcacttataagtgagaacatgtggtatttggttttcttttcttttttttttttttttttgagatggagtttcactcttgttgcccaggctggagtacaatggcaccatctcggctcactgcaaccttcaccttccaggttcaagcaattctcctgcctcagcctcccgagtagttgggactacaggcatgtgccaccacacccggctaattttgaatttttagtagagacagggtttctgcatgttggtcaggctggtctcgaactcccgacctaaggtgatccacctgcctcagcctcccaaagtgctgggatgacaggcctgagccaccgtgtctggccagtatttggttttctgtttctgtgttaactcgcttaggataatggcctctagctgcatccatgttgctgcaaaggacataatcttgtgatttttcaaggctgtatagcgttctgtggtgtatacatatcacattgtctttatccagtccacctctgatgggacctgggtggattccatgtcttcactattgtgaatcctgctgcaatgaacatacaagtgcatgtgtctttttggtagaatgatttattttcctttggctatatacccagcgatgggattgctgggctgaatggtaactctgtttgtagttctctgaaatatctccaaaccaaactgctttccacagtggctgaactaatttacacccaccaacagtgtataagtgtcccctttgctccacaatctcaccagcatctgttaatttctggcttttcagtaatggccattctgactggtgtgagatggtattgttgagggataatttaggaatcagagagaccgaggggttgaggaggatttattattattattattatttaggtgcaccggccccagtcagattaacatccaaaaagactgaggctcgaacagagagtccggttaccttttaagcattttgtggggttgggggagatctgtgcagggggaagcatattacagaagcaagaaacaaaggcagttattcaattgagacatgcatcacattattccttacttttcaagaaaaatatgttttacgacttgaggttatcctgtctagtgaccttgcagccgcacggcaagagaaacagggtcttcacaatgcctgggaaagggagagataaggctcactagccacagacagaaaaacaggcagttcatgtttaaaggactccacctctttctcttcctcggggggaactgggttttcttaaatacaactgagtttttgtttacacattctgtaatttcttttaattcctgttccagtatctcactgtgaaactccctatgtttttatacgattctcagggggtttcctctgggcatgattgggcacaacttcccacagtcagctctgggtacgacctccacattgcagaattgagaagttgacccagaaatgcattttgggctgagcagacaattgtcagagttgctggctagaccacagatgtgtcagagggaccacggcctttctgtaagctcatggtcagaggcggaggggagttgtgaacgttctgatgaaagcagtcaacgtgaaagcgctctggtgatgggcgctggtgctcacccaccacttcctgtgtatctatctccctggcccgcccggctcagtccccactgctcagcactaggccggcagaatctgagcgatgtcttccacactccctgccctgctctgcgtcggtgagttctggcgtggaaggggaatgggatcacggtgtgcctgggaggcaacaggtctcattactcccgtcttccagggctgtgtctgagtcagaggatcagcgcccagcagcgtgagtccttccttcaaagcccagggtcactcttccggattcaggccaagctccttccacccaagcacggctggggtgaggggacagggtgctggcttcccaggagagcttggggccagcagctgggtggagcctaaggttggggggagggggctccgctggaactccagcctctgattcccttccagagactctcccaaaaccgttcatctgggccgagccccatttcatggttccaaaggaaaagcaagtgaccatctgttgccagggaaattatggggctgttgaataccagctgcactttgaaggaagcctttttgccgtggacagaccaaaaccccctgagcggattaacaaagtccaattctacatcccggacatgaactcccgcatggcagggcaatacagctgcatctatcgggttggggagctctggtcagagcccagcaacttgctggatctggtggtaacaggtaactgtccggttctctaactggagagtgatctcagtctgcatccgggatgcagcatcatctatgaactcttccaagccccactcagacactgcttgtctcggtaggaggctggaaggaggggtgatccccatcacaatccttgcctacaaggggttgtctgcagaccgtgtctctacgtcctaggagcagatgtgtcctcagtcagtttctccatgacacagattctgagatagatatttgtatgcaggggtatgactgaggaatgtcctcaaaaacaatgcctgtgggccaggcgcagtggcttacactttgcttccctcacccatcacaggtggtgggttttttttttttttatctgttttgagacggagtttcgctcttgtcacccaggctggagtgcagtggtgcaatctccagtcactgcaacctccacctcctgggttcaagtgattctccagcctcagcttcccaagtagctgggatcacaggcacccaccactacgccacattttgtatttttagtagagatggggtttcaccatgttggccagggtggtgtcgaactcctgacctcagatgatccgcccgcctcaccctcccaaagtgctgggattacaggtgtgagccatcacacccagccaggtggtggttttctaaaaaaaaaaaaaaattagcttttttttttttttaacaatatggttgtttattattattatcaagtattatacatagttacatatacatacataattgtatgtgctatacaattaggtttgtttataccagcaacaccaaaaacacatgagcaatactttgtgctaggaaggctatgatgtcatcaggcaataggaatttttcagtttcattataatcttatgggaccaccatcatatatgtggtacattgttggccaaaatgtcattatgcagctcacaacagtatttcatgtccattcaaatatcttcttttgtgaaatgtctatttaaatcttttgcctatttttaaattgggttgcttatattttgattgattaggaaaagttatttctatattctgtgtcatatacttgtgttgaaatatatatattttttgtctgtgccttttcatttgctcagggtctttggaccttgtttggaggttctggcaggggaacacagctactcatttattcttttttttttaatttttttagtatttattgatcattcttgggtgtttctcggagagggggatttggcagggtcataggacaatagtggagagaaggtcagcagataaacatgtgaacaaaggtctctggctttcctaggcagaggtccctgcggccttccgcagtgtttgtgtccctgggtacttgagattagggagtggtgatgactcttaaggagcatgctgccttcaagcatctgtttaacaaagcacatcttgcaccgcccttaatccatttaaccctgagtggacacagcacatgtttcagagagcacggggttgggggtaaggtcatagattaacagcatcccaaagcagaagaatttgtcttagtacagaacaaaatggagtctcctatgtctacttctttctacacagacacagtaacaatctgatctctctttcttttccccacatttcccctttttctattcgacaaaaccgccatcgtcatcatggcccgttctcaatgagctgttgggtacacctcccagacggggtggcggccgggcagaggggctcctcacttcccagacggggcggccgggcagaggcgcccccccacctcccagacggggcagtggccgggcgggggctgccccccaacctcccggacggggcggctggccggggcttttttttttttttttgagacagtctcgctgcagtgcagtggtacaatctcagctcactgcaacctctgcctcagcctcaattctcctgcctcagcctcccaagtagttgagattacaggcatgtgccaccacacccggctaatttttgcatttttagtagagacggggtttcaccatgttgaccaggctggtctcaaactcctgacccaggaggtcgaggcttcagtaagcaaagatagtgccacggcgctccagcctgggaaacagagcaagaccctgtatcatttttaaaaatggttttagacggtaaatcttctattgtgtgtatttgaccaaaataataattaaaaaaaaaaaaaaaagctggctgccaggcatggtggcaggcccctgtagtcccagctacttgggagggtgaggcaggagaaacgcttgaacccgggaggcggaggttgcagtgagccaagatcgtgtcactgcactccagcctgggcgacagagagagactccatctctaaagaaagaaaaaaaaaaatagctggctgctcatcactgagtttctggtgtggtggccccaccttctctcatagaaatgtatgacacacccaccctctcggttcatcctggacccgaagtgatctcgggagagaaggtgaccttctactgccgtctagacactgcaacaagcatgttcttactgctcaaggagggaagatccagccacgtacagcgcggatacgggaaggtccaggcggagttccccctgggccctgtgaccacagcccacagagggacataccgatgttttggctcctataacaaccatgcctggtctttccccagtgagccagtgaagctcctggtcacaggtgaggaaatgctcaattccccacacccttcgccgccatgtgctacctggagccctgagggatccccagagagtgatggggagggtgtccaagggacgtccacttcctgggtgcctggttggtcatgtgaggaagaacaccagaagcaggaaggaggagggaacagagaaaggaatggtaaggcgggtggatcacaaggtcaggagttcgagaccagcctggccaagacggtgaaaccccgtctctactaaaaatacagaaattagccagacgcagtggcggacacctgtagtcccagctactcaggaggctgaggcaggagaatcgcttgaacccgggaggcgggggttgtagtgaaccgagatcataccaccgcactgcaacctgggcgacagagcaagactccatctcaaaaaaaaaaaaaaaaaaaaaagaatggcaagaccggaggaaaccaaaaacccttacttttttttctttatctccttttccaggcgacattgagaacaccagccttgcacctgaagaccccacctttcctggtgagtaactggtccttctaagctcagacgagcgatcagagcctcccag[141 bp omitted]cgaaaccctgtctctactaaaaatacaaaacttaggctgggcatcatggctcacacctgtaatcccaacacttcgggaggccaaggtggttggatcacaaggtcaggaattcgagaccagcctgaccaacatggtgaaaccccatctctactaaaaatacaaaaattagccgggcctggtggtgctcgcctgtaatcccagctactcaggaggctgaggcaggagaattgttgaacctgggatgcagaggttgcagtgagctgagatcgcgccactgcattccactccactgcacgacacagcgagactccatctcacagaaaaacaaaaacaaaactattatatatatatattcatcaagtgcatagtatacacagtgaactacactgtaacagtcagccaggcagatatcttgactgtgcagcacttagattctagcaggaggagacacaccatcggtcaacgtcaggatagcacacaggagggaatgatgctatggaaggaaaagacaaagtagaacagacttacagtgattgaaatggcagctagcaatattaaataggtttgtccagatggacctcacagagaaagaaggcatctgagcaaatgcgttcagacttgagttaatcatgtggctgtcaggagaaaggaggctctggagagaatgaaatggcatctgcctgtgccctggggcaggaagataactggggtaatacaataataactatgaggccaggagggttgaaaatgatgtttggaagatgacg[136 bp omitted]acacggtgaaaccctgtctctactaaaaaaaaatacaaaaattatccgggcgtggtggcgggcgcctgtagtcccagctacgcaagaggc[136 bp omitted]atagtgagactttgaatttcactatgtgtgaggagaaagaggtaatgatgacttaatgaggaaaatgaggcttaaatagaagacgggctgggccgggtggctcctgcatgtaatcccagcactttggaaggcaggggcggctggatcacttgaggtcaggagttcaagaccagcctggccaacacagtgaaaccccatctctactaaaaatacaaacatgagttgggtgtggtggcgcacgccagtaattacagctactcggggctgaagcaagaggattgcttgaactcgggaggcggaggttgcagtgagctgagatcacaccactgtactccagcctcagaggcctgccatcccagccctttgggaggccgaagcaggcaggtcatctgaggttgggagttcaagaccagcctggccaacatggcaaaaccccgtttctactaaaaatatgaaaaaaattacctgggtatgtggtgtgtgcctgtagtcccagctactccagaggctggaacacagtgagactctatctcaaaaaaaaaaaaaatagaagacatgactggtgcaaagacacatgctcacaagtgctagaatggaattcctcgtcaggttcgtccatctgtggacccttccactttacctgctggatgaagctcctgggacccgcagggtgaggtgggaccttgtaaagctgcagaacgtcatggggtagacccaagggaaggagtgctggggtggaggaggtcaaaaccatcctcttttcttcacttcccttatcatcagcagacacttggggcacctaccttttaaccacagagacgggactccagaaaggtaagtagacagctggggccataggctctgaaggaaggggctgggcatagagtagacctaggaagggaatctaaatgggaacaagagggtgtccttggccaggcgcagtagctcacacctgtaatctcagccctttgggaggccgaggcgggcagatcatctgaggtcgggagttcaagaccagtctggccaacatggcgaaatcccatctctactaaaaatacaaaaaaattagccaggcgtggtggcgtgtgcctgtagtcccagctacttgggaggctgagacaggagaatagcttgaacccaggaagtggaggttgca[134 bp omitted]ttctcctgcctacagaccatgccctctgggatcacactgcccagaatctccttcggatgggcctggcctttctagtcctggtggctctagtgtggttcctggttgaagactggctcagcaggaagaggactagagagcgagccagcagagcttccacttgggaaggcaggagaaggctgaacacacagactctttgaagaatgaccatgagacacagtggccatgggtggatctgaaagctggtgttgagcctgggcggcgtgagctctgtgttggacccacggaggagggagtcactgcagggaaagagggacactggcattccatttgtcagagcatcccggacgatgcagagggtgggagaactacatgctaaatttctttttttttttttttgagacagagttttctcttgttgcccaggctggagtgcaatggcgcgatcttggctcactgcaacctctagctctccatccctcgggttcaagtgattctcctgcctcagcctcctgagtagctgggattacaggcatgtgccaccaccccagctaattttgtatttttagtggagacggggtttctccctgttggctggtctcgaactcctgacctcaagtgatctccccgccttggcctcccaaagggctgggattacaggcataagccgctgcgcccagccactgaatttcttctgtagacaaatcctatggtctcttctaggctctaactatttttgtaccacttactgcaaaccatacttttaaccactctggtcttttctgaaaagatctctccttctttaacaggatggccatggaaatatttttttcctactttggtctttttttctttcctttctctgcaggaagccattcaaaatagttaataaccaatatagaataggtctgtatcaaatggttcaggaggcattgtggcaacaaccagttgtagagaagcagctttataagtgaatcctgccaggcacggtggctcacacctgtaatcccaacactttgggaggctgaggcgggcagatcacctgaggtcaggagttcgagaccagcctggccaacatgatgaaaccccatctctactaaaaatacaaaaactcggccaggcacggtggctcatgcctgtaatcccagcactttgggaggccaaggtgggaggatcacctgaggtcaggagttcgagagcagcctggccaacatggtgaaaccacatctctactaaaaatataaaaattagccaggtatggtggcgtgtgcttgtaatcccagctactcaggaggctgaggcaggagaatagcttgaacccgggaggcggaggctgcagggagccaagatcgcaccactgcactccagcctacgtgacagagcaagattctgtctcaaaaaaaaaaagaaaaaaaaaaaataagtgactcctggctgcatcccaaccataccccaattccttctaaccacagaattattccatcttctcttccttttttttttttttctttttttttgtttgttttgttgggacagaatttcactttttttttttttaatgtaagttttagggtacatgtgcacaacgtgcaggttagttacatatgtatacatgtgccatgttggtgtgctgcacccactaactcgtcatttaacattaggtatatctcctaatgctatcccttcccccgagtttcacttttgtcacccaggctggaatgcagtggtgcaatcttggctcactgccacctccacctccagggttcaaatgattctcctgcctcagcctcctgaatagctgggattataggcatgcaccaccacgcccggctaatttttgtatttttagtagaaatggggtttcacaatgttggccagactggtcttgaactcctgacctcaggtgatccaccagcctcggcctcccaaagtgctggaattacaggtgtgagtcaccgtacccggccaccatctttgcttctttatccacaccttgccttgttcttcagggctctgcagagatatcatttcctccaagagtttccacaactccgacttcacaaagatagcacttttttttttttttttgagacagtctcactctgtagcccaagctggcgtgcagtggcacaatctcagctcactgcaaccttcgcctctggggctcaagcgattctccttcctcagcctcccaagtagctgggactagaggcgcgcgccaccacacccggttaattttttttgcatctttagtagaggtagggtttcatcatgttgccctgggtggtctcaaactcctgagttcaggtgatccccccgccttggcctctcaaagtgctaggattacaggcgtgagccactgcgcccagccaagacaacactttcctcatcccaaagcacctgttaattccctgtaacagcacttgaaccctgattcggcatgcatgtccattttcctgcctctaccgtgaactcgtgtgaattgatctatgtcagatttagtggctgcattcacagctcccgcaactataacggggttctcgggaaatatatatcaaatgagtgaatgtatatacggggctgtggcacagcctgcaacttgagacttctcactaggggtcttgaaatgctgtctggacaccaccatcgctttcctccctgagaacttctacttatcaacccatttatatactcatcgcatgggtcctcacgccctcccattattctggtgcctcatgccggtcaaatttattctctaaatctgatttttccattaaatagcagcctggccaacacggtaaaaccccatctctactaaaaaatacaaaatattagccaggcgcagtggcttgcacccgtaatctcagctactcgggaggctgaggcagcagaatcacttgaacccgggaggcagaggttgtggtaagccgagattgcaccactgcactccagcctggtaacagagcgagactccctctcaaaataaataaactgctgactcgcgtattttttctttaccccaactcattccttacatgtaggcacctgtaatcctagctactcagaaggctgaggca[137 bp omitted]tctgctttactggttcagtaaaagccaggaaacacaactttgtggtaatctgaatgttattgaactgtattttgttcactttattgtaaatactagtgaacagtgaataaatggttgtatattcctaataagaaaaaaaaaaaaaaagacccaaagtacagcgagctgatgccgatctcatttcgcagaggtccgcctgctctcccctctccaagagtgtaatcctatgcttaataaacttatgccgctttgctatgtgtgtgtatcacacccaattctttgttcgaaacaccaagggcctggaacttcacagctttggctggtaacggggagcaggggtaaagacatttaaaagctgcttgtgttaaccataatcgccatcccatatatcagacccccagaactaactcatcttataactgaatattgtgctttttttttttttttttttttgagacgaagtcctgctctgtcacccaggctggagtgcagtggcgcgatcttgactctgcaacctccgcctcccgggttcaagcgattctcctgcctcagcctcccgagtagctgggactacaagtgcgtgccaccacgcccggctaatttttgtatttttagtagagacggggtttctccatgttggtctcaaactcctggtctcaggtgatccacccgccttggcctcccaaagtgctgggattacagacgtgagccaccacacccagctacttgtgctttttgaccaacatcttcctctcctaccacccccagcccctgataacctccacctactctcacttctaggagatcaactgttctatttttttttttttttttttttttttgagtctcgctctgcacacccaggctggagtgcagtgctgcaatctcggatcactgcaacctccgctttccgggttcaagcgattctcctgcctcagcctccagagtcgctgggattactgagccaccgcgcccagccagaagacccacgctccctaagacataacccacactggtggcctttgttctgacttctcacctgtgctccccacccgctagaaactggcttctctccccacacttcctctgaagctgtctgtgtgaccaacactaatgagcttccttcctggaacatgcagtgacccttttcagcccttctcattattgctcccccacagttgtatttgacacgttgaccacttcctcctcgaaggactcacttctctggctttctcggacacttcttgctactcgttttctgacggttacagtaccaacaggtttgcaggcacctccaccaccagagccaatcccagctactcgggaggctgaggcaggagaatcgttcaaacccgggaggcagaggttgcagtgagtcgagattgcgccactgcactccagcctgagtgacagactgtgactcctcaaaaaaaaacaaaaacaaaaacaaaaaaactacagtcttgctctgtcgcccaggatggaatgcagtggtgccatcttggctcactgcaacctctgcctgctggggtctagcgattctcctgcctcagccccccaaggagctgggactacaggcatgtgccgccacgcctggctaatttttgtatttttagtggagatgggggttttaccatgttagccaggttggtcttgaactcccgacctcatgtgatccgcccaccttggcctcccaaagtgcgaggattacaggcccccgcacccagcctaggatcctgcacctctctagcctagcagttctctgctgggtgattttgctctccactccaggggacatttggcaatgcccatggtaatttttaattgtcatgacttggggaggggttctactggcatctggtaggtagggtccaggggtgctgctcagcttcctacaatgcccagggcagccccagatggcagcagcaccaaggctgagaaacactggctcatgcagaaagcaaccaccttacacccttcagtgcagggacaaaggcagggttacgagtccacggaaactctccagtctcagcctacgtaagacgtggctatttttctttcttattgtttttattcatttatttttcttgagacagagtcttgctctgtcgcccaggctggactgcagtggcgcgatctctgctcactgcaagctccgcctcccggg[135 bp omitted]tctcaaagtgctgggattacaggtgtaagccaccgcacccggccttattcatttattttttgagatagagtctgagccctttattttatttatttagagaccaagtctcgctctgttacccaggctggagtgcagtgtcgtggcctcagctcactgcaacaacctccgcctcccgggttcaagcgattctcccaccttggcctcccaaagtgctggcattacagacacccactaccatgcctggctaattttttgtacttttagtaagtaaagacagggtttcaccatcttggtcaggatggtctcgaactcctggcctcaagtgatcggcccgcctgggtctcccaaagtgatgagattacaggcgtgagcgaccacactggcctaatgtgtagttttttatctgtggcctcccttctgccctcccccttctgagactctgaagcccattacatcactctgcctttgtgtaccaacagcttagctcccactgagaacatacagagccaggcacggtggcggtggctcacgcctgtaatcccatcactttgggggtgctgaggcaggtgtatcgcctgaggccaggagttcaagaccagtctggccaacatggtgaaaccccatctctactaaaaatagaaaaatacatagctgggtgtggtggcacgtgcctataatcccagctactagggaggctgaggttggagaatcgcttgaacccaggaggcggaggttgcggtgagccaagatcacaccattgcactctagcctgggcaacaagagcaaaactgtcttaaaaaaaaaaaaaaaaagtgagaacatatggattctactcctgttagaataatggcctccagctccatccaaattgctggaaatgacattatttcattccttctaatggctgaatagtattccatggtacatagacaccacgttttctttatccactgtagggaccagccccacagggtcggtgggtctctccctgtgtgcggcgacgagagagtgtagaaataaagacacaagacaaagagacaagagaaaaggcagctgggcccgggggaccactaccaccaatgcgcggagaccggtagtggccccgaatgtctggctgcgctgttatttattggatacaaggcagaaggggcagggtaaagagtgtgagtcacctccaatgataggtaaggtcacgtgggtcacgtgtccactggacagggggcccttccctgcctggcagccgaggcagagagggagaggagacagagagaaagacagcttacgccattatttctgcatatcagggactattagtactttccctaatttactactgctatctagaaggcagagccaggtgtacaggatggaacatgaaggcggactaggagcgtgaccaccgaagcacagcatcacagggagacggttaggcctccggataactgcgggcgagcctgactgatgtcaggccctccacaagaggtggaggagcagagtcttctctaaactcccccggggaaagggagacccccccccccacccgctgcccctttcccggtctgctaagtagcgggtgttgttaattgacaccttttgctaccgctggaccatgatccgcttggtgacgggtgtcttcccagacgctggcgtcaccgctagaccaaggagccctctggtggccctgtccgggcataacagaaggctcgcactcttgtcttctggtcacacctcactatgtcccctcagctcctatctctgtatggcctggtttttcctaggctatgattatagagtgaggattattataatattggaataaaaagtaattgctaccggctaatgattaatgatactcatatataatcatatctaagatctatatctggtataacaattcttgttttatattttattatactggaacagctcgtgtcctctgtctcttgcctcggtgcctgggtgccttgccgcccacaatccactcattattcaatgggcacttcggttggttccacatctttgcaattgtgaatggctgagccagccattcttaactgggggtgattttgtccccatgggggtatctggccacatcccgagaggttttttggttgtcacgagttgcagtgggggcaggctcaggctcatccaagtccaggggtgctgctatacatcacgtgatacacaggacagtccttgctacggactgaattggtcccaccaaacgtcatgtacaagccctaccccagatgtgactctatttggacacagggcttttcagaggtaattaaggctggtcaggcgccgtaatcacagcactttaggagttctgtgtttattactggtaagtgggtaagagcccagtgtggcagctcacgcgtgtaatcccagcactttgggaagcgaaggcaaggggataactggaggccagcagttcaagacaagcctggtcaatacagcaagactccatctctataaaatattttaaaattagccaagcatgtttggcatgcacctgtaatcccagctcaggaggctcaggtgggaggattccttgagtttaaggctgcagtgagctaagatcgcaccattgcactccaacccggctgtgggcaacacagcaccaccaccatcttggctgggcacggtggctcacgcctgtcatgccagcactttgggaggccgaggcgggtggctcacctgaggtcaggagtttgagactagcctggccaacatggtgaaatcacgccactgcactccagcctaggcaaccaagtgagactctgtccgccccaccaccccaccaaaaaaaagactactatcttaaacaaaatcaaaatttttaagtagataaaatatttaggggaaaaaaacttcaattaaatatgcagcagagtccgacccagatgttttcactcccagcctctacctactatctttgtgtctttatttttagcaaattctacacgggaacttcatgtgcatgtagaaccctaaatgttgactcagccctacctctcatcacctgaccacttcctttattcacgctgtctctaccacccttcccatcggtgtgagctgtatcccgctaaacactgttaccacccacagcctgcattactaccagctgactgtagccttaaacaccacagtgatctcgagcatttgagaagacttatcttgacaagggctcacgaaagacagcaatgctcaacagcaagataaatgagggccttcatgggatcattcagtgctgaagccactcaacctccaggtttgggttagtaaaaagaactttgtcaggccaggcacagtggctcacgcctgtcatcccagcactttgggaggccaaggcgggcagatcacctgaggtcaggagttcaagaccagcctggctaacatggtgaaacctcgtctttactaaaaatacaaaaattagccaggcatggtgacgcacacctctagtctcagctactccggaggctgggacagaagactcacttgaacccaggaggcagaggttgtagtgagccaagatcgcaccactgcactccagcctgggcgacagaggcaagactccatctcaaaaaaaaaaaaaaaaaaaaaaagaaaagaaaactttgtcatacaagctttcaacctaaagcattagccatatgcccgtgtttttgtgcctgggaccatgacaactttccccatatcaatgctcttattttttttttttcgagacaagagttttgctcttattgcccaggctggagtgcagtggcacaatctcagctcaccgcaaactccgcctcccgggttcaagcgattctcctgcctcagcctcccgagtagctgggattacaggcatacaccaccccacccggctaattttgtatttttagtagagacgg[135 bp omitted]cgcaagcgtggagagccaagtgaggagaggggtcagtcccttttggcagcgcctggaagccagtgctaacatcatggtgacaacttttcattcttaaggaaaattgcggagtgacttctatgcattttctatgaatgaccaaatacagggtgtggaaaagctgtgtttgccatggcaatgggaagccgagagaaacggggaggcgagagagacagagacatacacagagactcccagagacagccacacagactcacacagaaacagacagacaggctgggctcggtggctcacgcctgtaatcccaccactctgggaggctgaggcgggtagatcacctgaggtcaggagtccgagaacagcctggccaacattgtgaaaccccgtctctagtaagaatacaaaaaattagccaggcatggtggcacagggctgtaattccggctactcggaaggctgaggcaggagaatcacttgaacctgggaggcgcggttgcagtgagctgagatcacgccattgcactccagcatgggcgacaagagtgaaactccgtctcaaaaaaaaaaacaaaaaaaaaaaacgaaagaacagagagacacatacaaagacagagatagaaacgcccagcgacagagacacacacagagaaacacagacagacacagagacacacacacagaaacagacacagagacagagagacaaaaagacagacacagagaaacaaagagagacacacagagacagagagagagagagacacatacacacacacacagagagtaggaggcggcccgtgggagccgagcagaaccagcgtgaggcagggccatcttctgaattaaaggcaacagtgactgtaagcttgtgctttgtgagtaacaggatagattagaacagggctggctgcccatggcccacgagctgtttctgggaagcctccgcaggtgccagccaggccctgcgctgcttccatgtccaaaggcacagctgagagctgatgagagaccgcggggcccacagtgccaagcatatgaactatctggcccgtttgtcaatgcgtgggttgatcacataagttatgatcacataagtcacaaagacacactgatcacatagatgcacctggcagatagtagaccacatggcgcctgagttagggaagaaaagaaatagaagaatcaaccgaatcatccctgaacttcttagcaatacttcctcctagacaaagcacagagtaccatgtttattgcaggtttgctcctgagcatgtcaataaacgcagctgcaacgagagtgctctaactttattatccctgtgagaaagtacatagcgtcatgtgaagggggtgcgtgactcgtgcagaatctcccaaaaatagtgagaaaaccagtgtcaaatcctacctctcgacagactctagtgttaacatgtgaccctctgacctgcattcataagacatcttagagacccgaatcccgcttcctgtgtaattcgtagagcgatcccaggctgctcagcaaaaaaagtcacagcacggaggtgccgttgccccggaagcattgcaatcaatagtcagcttgggattcttttctttcacttcctccaacagcttcttgatttccaaattagtttcataggtcttcaacctggagggatcagagaacacaaatgttcccagaaattcattctcaactacccaggatgcctgaatatctgttttcaaacactcaaagcaggaaacgtttttgggattttctgggggacagggtcttgctctgttgcccaggctggggtacagtggtgccatcttggctctctgcaacctccagctcccaagttcaagcaattctcatgcctcaggctcctgagtaactgtgattacaggtgtgcaccaccacgcttggctaagttttgtatttacagtagagatggggtttcgacatgttagccaggctggtctcgaacttctggcctcaagtgatccatccacctcggcctcccaaagccatgggattacagatgtgagccacagcacccagtcagaaaagttttctaaaaagaaatttagacccacacaatggggatccttataagtctaagaaaaaaaagattatggccaggcacggtgtctcgcacctgtagtcccagcactttgggaggccaaggcaggcagattgcttgagctccgcagttcaaggccagcctgggcaacacggtgaaaccctgtctctaccaaaaatagaaaaagttagccaggaatggtggtgcacgcctatagtcccagctactcgggaggcggaggcaagaggatcacttgagcccaggaggcggaggttgcaacgagctagagattgccctactgcactccagcctggtaacagagtaaaacatgcctttaaaaaataaatttaaaaaatagataatcaggctggtgcacggtgactcacgcctataattccagcactttgggaggccgag[132 bp omitted]gagacaggagaatcgctttgaacctgggaggcagatgttgcagtgagccaataccgcaccactgtactgcagcccgggtgacagagcgagactctgcctccaaataaataaataaaaaatagtggcaaatcaaaccttcagtagaactaagagaatgccagagtgaaccccagggttaatgatagcaaacttggctctaacgtggctgcagcatgcaagcctgtgtatgtgaacatgaggggtggtgattgtggagacactggcttgctatgttgcccaggctggtctcaaactcctggcctcaaacaatcctcccaccttggcctcccaaaggaggaactgaggaatgagaaaagaaatacgccccaaacatatgacataagagaccacagggggctagagatttgtcaccaatagtccttggtggcattacagacctcggtcccaccaacaagagaagcatgacactatttagctcaagtttcatgatatacccctaaaaccttaacccatttatgccagaggttacaattatttgaactgcagacgtgtgaaaaatcgtaccttgagcaggatataaataactcccacatgcttagcgttccaataatgcaacactgggcatcatgaagcagtttacatgcgtatcatctctacaactaaaataactcttgaataagacaagtgggctgtgcacagtggctcacgcctgcaatccgggtactttgtgaggccaagacaggaggatcgtttgaagccaggagtttgagaacctcggcaacacggccacacagtgcagcagagcaaaacgttgtctcagaaaagaaaagacaaaggc[144 bp omitted]tgaaaccccatctctactaaaaatacaaaaaattagccgggcgtggtggcgggcgcctgtagtcccagctgctcgggaggctgaggcaggagaatggcgtgaacccgggaggtggagcttgcagtgagccgagatcgcaccgcttcactccagcctgggcgacagagactggagtctctgtctcaaaaaaaagacagattcaaaaaaaaagacagactccgtctcaaaaaaaagactccgtctcaaaaaaaaataaaaaatacaaataagtcattgaaaagatatacacgggtcacaactaagggagcatctgtaggacgatcttctgaaaagctaagacccaggacagctctgggaactacctatttttggatataatgattaggggtgtgtgtgtgtgtgtgtgtgtgctcatgcacacacatacacacaagcttccagtctgtactccaggatgatttaaactctcagtatgcctaggactaagtgttttgggggaaagttggacaatattcaattcacagagcattttagaaaagtatctaatttttaaattatctcctaagctaggagtgtgctatagaaagatgccttaagttgatccctacaaagagtacacacactcccaaaaaaactcttctctgcatgggaaattcaccatgtgaaacagccatcccagggccgagcacagtggctcacgcctgtaatcccggcactttgagaggctgaggcaggtggatcacctgaggttgggagtttgagaccaacctgaccaacatggtgaaaccccatctctactaaaaactacaaaaattggccaggtgcagtggctcatgcctgtaatcccagcactttgggaggccaaggcgagaagatcacctgaggtcaggagctcgagaccagcctggccaacatggcaaaaccccatctctactaaaaatacaaaaattagctgggtgtggtggcgagcgactgtaatcctagctactcaggaggctgaggcaggagaatcacttgaacccaggaggcagaggttgcactgagccgagatagcgccactgcactccagcctgggggacagagagagactctgtctttaaaaaaaaaaaaaaaaaaaaaaaattagccagctgtggtggtgtgtacctgtaatcccagctactcaggaggttgaggcaggaaaatcgcttcaacctgtgagaaggaggctgcagtgagtcaagatcgcgccactgcactccagcctgggcaacagtgagactccatcccaaaaagcaaaaaccaaaaaggccgggtgcaatggctcacctctgtaatcccaccactttgggaggccgaggcaggtggctcacctgaggtcaggagttcaagactagcctggccaacatggtgaaacccctctctactaaaaaattagccaggcatggtggcaggcatctgtaattccagctacttgggaggccaaggtgggagaatcgcttgaacccaggaggtgggggttgcagtgagccaagatcgcaccactgcactccagcctgggctacaagaacaaaactccgtctcaaaaaaaaaaaaagaaaaagaaaaaaattagctggacatgttggcatgcctctaggcccagctactcatgaggctgaggcaggagaattgcttgaacctgagaggcagaggttgcggtgagccaagattgcgccactgcactccagcctgaatgacagagcacgactccatctcaaaaaaacaaaaacaaaaaacaaaacaaaacaaaacaaaaaacccatacctgagtatcttcaaggatccagttctttgtcttagaaccccaaagagcttaattatgccactcttccacaaatgattctggcccaggtccagagtttcaagcttctgattgctgaggagagcagatccaagatgctgacaatagaaaggcatgagggagcagctccagaggctgttgaggaagaacatggaaatccacgcattcactgagcaggtagtggctcaagcgtgtaatcccaacacttcgggaggccaaggcgggtggatcacttgaggccaggtgttcgagaccagccttgccaacacggtcaaaccccatctctactaaaaatacaaagattaggcagggcgtggggacagacacctgtagccccagcaccttgggaggccgaggagggtagatcacctgaggtcaggagttcgagaccagccaggccaacatggcaaaaccccatctctacaaaaaattagccatgcatggtggtgtgtgcctttaatgctagctacttgggaggctgaggcacaagaatcgcttcagcctgggaggcggaggttacagtgagcccagattgcgccactgcactccagcctgggcaatagaatgagactccatctcacaaatatataacataaaatgaaaatacaaaaattagccaggtatggtggaaccacctataattccagctactcgagaggcaggagaatcgcctgaaccaggaggcagaggttgtagttagccaacatatcaccactgcattccagcttgggtgaaagagtgagacttggtctcaaacaaaacaaaacaaaaaaacaagcagcatatttgctggggctccagtagtgaggaaaggcagaggggagtgagcagaagaaatccttgtcctcagagtttttagtgacagcagacatctcgatatgttctattgaagacaatggatgatggtattaaaataaacagggtagaggtaagtcaaacagagaggcattgattggctagacttatgctggtcatttaagtcctcttttggaaagtgatatgaggaaagaaactgaaggatggtagatcatgaaccagcatgctaactgggggagggaatcttgtaaataaaatactgagctagtgagaaagtagaatgatttatggctcataacttacacgaggatcccccataaggccctgtaggccactgtagaagcctttggttttgttttttttaaggcagagtttcactcttgttgccaaggctggagtgcaatggcgtgatctcggctcactgcaacctccgcctcctgggttcaagcgattctcctgccccagcctcccgagaatctaggattacagtcatagctgagattacaggaacaagacaccaggtaatccacccgtttgcattgagcttttgagtctttggaaataaaggtatcacggtctggcttgaggcttgaaatattcctcagggggatgggttaagaaacttcaggaggccaggaatggtggctcatgcctgtaatcccagcactttgggaggttgaggcaggtggatcacttgaggtcaggagtttgagaccagtctggctaacatggtgaaacctggtctctactaaaaatacaaaaattagctgggtatggtggtgcacgcctgtaatcccaactactcagctcaatcaggagaatcgcttgaaccttggaggctgaggttgcagtgagccaagatcgcaccactgcactccagcctgggtgacaaagcgagactctgtctgaaaaaagaaaaaaagtaccctgtgttctagtgttttttttctttactctacagcaaagctaagtagtaatgacgtgcagattctctttgcattaggattgcagattctagttggaaaataggttgcatccaagagatgcaactgacaaactttggggagagaagtgatgaagagctcgccattccatttgtggagactttgcattttctgggggtggtatcccacctatggttccctgggtttatgaggtggggcaggctcactgcttcctgattactggatcccagcagaagcagcatgctgctgaagtccaggtcactgggggccattgttatatatatttcacttctccaggccctctacctgactttagaagtgcccacccacatatattcagtttctggaggggtttgatcttaaaactggat[185 bp omitted]ggtggcgggcatctgtagtcccagctactcaggaggctgaggcaggagaatagcgagaacccgggaggaagaggttgcagtaagccgagatcgcgccactgcactccagcctgggcaactagaacgaggctccgtctcaaaaaaaaaaaaaaaaaaagaaaacatagaaattaaggatttccagatttccaaacactttaaaaatgaggccaggcatgatggctcatgcctgtaatcctagcacattgggaggccgaggtgggaggattccttgagcaccagaattcaaaaccagcccgggaaagatgacaagacctcatctctacagaaaacagttacctggccatggtaatacatgcctgtagagccagctactcaggaggctgaggtgggagaaccgatcaagcctggaagaccgaagccgcagtgagccgtaatcaccccactgcactccaggctgggggacagagcaagaccctgtctcaaaaaaagaaagaaagaagaaaaagaaaatcgcctaccgtaggtgttttaggttacagtttggattctctaatgcctgacagagaatccacaatccacgagctatctggttgatactcaagtccaggtttgtgaggctgcaggcttcttggagcgcctctgagagatatctacagccaagcttggttatgctgcattgctgtaacctacaggataatcaaaggaagagaagcctgttatccctctggctaacgccctgtgaagcagttatttccaacactatataccttccacttatatactggaatgcagtgctgcactcttggctcactgcaacctctgcctcccaggttcaagcgattcttctgcctcagcctcccaagtagctgggattataggtgcccgccacctatataaccagacttggtggtgcacgcctgtagtgccagctactcagaagactgaggcaggagaatcgcttgaatccgggaggcagaggctgcagtgagctgagatcgcgccactgcactccagcccgggcgacagagcgagactccgtctcaagaaaacaacaacaacaacaaaaagtatttatataaaacataggtggcaggtaggaattgacccatgaactggagctatatacttccaggtgggcttgcacataaaagcatgcaaatgggccgggcacagtggctcacgcctataatcacagcagtgggaggccaagacgggcagatcatttgaggtcaggagttcaagaccagcctggccaacatggtgaaaccccatctctactaaaaaatacaaaaatcgggccgggcgcggtggctcaaacctgtaatctcagcactttgggagaccaaggtgggtgaatcacaagatcaggagttcaagaccagcctggccaaagtggtgaaaccccatctttactaaatacaaaaattagctgggcacgatggctcacacctgtaatctcagcactttgggaggctgaggcagacagatcacctgaggtcgggagttcaagaccagcctaagcaatatggagaaacccgtctctactaaaaatacaaaattagccaggtgtggtggcacatgcctgtaatcccagctactcaggaggctgaggcaggagaatctcttgaactggggagacggaggttgtggtgagcagagattgcaccattgcactccagcctgggcaagagcgaaactccatctcaaaaaaaaaaaaaaattagccaggtgtggcggcccatgcctgtaatcctagctactcaggaggctgaggtaggagaattacttgaacccaggaagcggaggttgcagtgagccaagatcgcaccactgcactccagcctggtgacagagagagactgttaaaaaaaaaaaaaaaacatccaaatggccttctgattccatccatttccagctctgcctgggacaacagcttaggctctgggttcagaccgacccaggacaggatctgagccctgggtcacttattttctgcgtggttagattatggaaatttcactttccctgtcattttatttcatgtttaagttttgtctttaactgacacattctacatatataggggtatagtgtgatgttttggtgcaggtacacttcgtataacgatcaggtaggtgactgtttgtttaacaatagttattctaagccaggcacagtggctcatgcctggaacgccagcactttgggaggccgaggcaggcagatcacttaaggccaggagttcaagaccagcctggccaacatggtgaaacctcatctccactaaaagtgcaaaaattagccaggcatggtggagggcacctgtaatcccagctacttgggaggctgaggcaggagaatcgcttgaacctgggaggcagaagttgcagtcagccaagattacaccactgcattccagtctgggcgacagagtgagacttcatccaaaaaaaaaaaaatgaatctcagaaatgaccactagctagaatttctgaacaggaacaggtcttcaaccctatgcaatctcttgaatatttttctaaccataattttaatgtgaacaggtagctcacgctgggcttctttccatataacaagattcagccaactatagttcgtgggtcaattccaacctgccacctatgtcttttacaaataaggatttttgttgagtttttttttgtttttttcttgagacggagtctcactctgtcgcccgggctggagtgcagtggcgccatctcagctcactgcagcctctgcctcccagattcaagcgattctcctacctcagccttctgagtagctggtactataggcacgcaccaccaagcctggttaatttttgtattttttagtagcgatgggttttcaccatgttggccaggctggtctcgaaccttaggtgatctgcccaccattcaccacctgttccccaataacctatggaaataaaagtttaaaaaaaggtgccactggccctaccacataactcaatctacctccaatagcaggcagtactatgtcataggaatttgaaagaacacacacaaagcatcagatccgagaaccaactactcatctcaaatcttccttcatagcaggaagaggctctgctgacatgcaaatattaacatgtttctacctgtatctgcctggttttttttgtttctttgtttttttgagaaggagtcttgttctgtcgcccaggctggagtgcagtggtgcgatctcggctcactgcaacctccgccttccaggttcacgccattctcctgtctcatcctcccaagtagctgggactacaggcatccgccaccacacctggctaatttttggtatttttagtac[143 bp omitted]ttaaaagttacatttgaaatgaattaacaagtactttcatgtctctcctgcttgaattcatgtgcacacacacacacacccagcagggacttacaccaaggtctgcagtttacaatcagggtaactcaagccctcacacagaaacttcacccctgtatccccaatggggttcttggccaagcacaggtgtgtcagcttcttgctgacaaccaagacagcagcaaggtccttgcaactggcttctgtaagacgacagttttccaacctgcaaaaatatgaaacaaatggtagaaggatgagaacatttccacaactccaacctgctcagtgatgtccacatgctagggtactcagcttcagcccttcctgttcatcccctgccctctgtcctgtgggagtcatcatggccacaaaagagcaggaaggcgagaaggccaagatg[144 bp omitted]agcctcctgagtagctgggactacaggcgcccaccacacctggataattttttgtattttttagtagagacggggtttcaccatgttagccaggatggtctcgatctcttgacctcgtgatctccccgccttggcctcccaacgtgctgggattacaggcatgagccaccgcacccggcctgtttttggtatttttaatagaaacagggtttcaccatgttggccaggttggtctcgaactcctgaactcagatgatccgcccacctctctgctgagattacaggcaggagccaccgtgccgggcctgaagcaggtgtttatttcagcaagaggcgccacgtgggtggcgcagtaagtcaggtgttaccctttctcttctatagccccagaactaaaccagagctgcccatgggaagaggagacttacgacaacatctgcaggaagtgttttgggcgtgtcatggtcttgtacagcaacatggcaccctcatccaggagcacattggctgagagacgcaggtgcttcagggactggttggctttgaggacatagaagaattcagcccactgctccggggtggcacagtgacctcccaacctgtgaaaagagtgggaaaagtcattcttctgggaggacagagtataccctatcagctttttttttttgagacagagtttcactctgttgcccagtctggaatgcaaaggcgtgatctcacctcactgcagcctccgcctcccgggttcaagctattctcctgcctcagcctccgaagtagctgggattacaggcattcgccaatttttgtatttttagtagagacgggatttcaccatgttggccacactggtcttgaactcctgacctcaggtgatccacccaccttggcctaccgaagtactgggattacaggtgtgagccaccgcgcctggcccagatcagcttcttctgcttcacttcccaagacattatgtctttggtttatctcattctactcatgcctccaaccctggcctgaattactggagagatctaatgttgcctctgcttcttcaagtatccccatggccattagggtaacatccagccacttctccaagagattgtaatacaattctgtgcaatgtttcaccaaaacggcctgtgtggatgattttgcaggggggaaaaaaaaattttttttttgagacaggatctcgctctgttgcccaggctggagtgcagtggcatgatcacaggtcaccacaacctgtctcctgggctcaaatgatcctcccacctcagcatccactgtagctgggactagaaggggcaaattgatgcttaatactcaaaataaaaattttatcctggccaggcgcagtggttcatgcctgtaatcctagcactttgggaggccgagacaggcggatcacttgaggtcaggagttcgagaccagcctggccaacatggtgaaaccctgtctctattaaaaatacaaacatttgccaggcgtggtggtgcacgcctgtaaccccagctactcgggaagctgaggcagaactgcttgaacccaggaggcggaggttgcagtgaacgagatcgcgccactgcgctccagcctgggtgacaagaataaaactgtctcaaagaaaaaaaaaaaaaaaaaagattctcattgagtgcagagaaggttgcatgctccttatgaatacctaactcctgatgatctgagattgatgatccattctcctcaggctcccaaagtgcgaggatcatgcactccataggatcaggcaccaacgattagctcctgtgcctgatctgagatcgaacagtttcatcccaaaactacccccaaacccgtctgtggaaaaaactgtcttgtgcaaaaccggcccgcggtgcagaaaaggctgggggccactgctctcaatcccaacaattaggcaaggtgcagtcaggaatagcatgtccctaaagctggaacccagcacagaattcggggtgtttctttgcatggatagctggttatgcaacacagaagacaagctggtgggggaaagaggagaggccgactcccccacacaggcctgtttgaggaatacattccctgtctgggacggcatctggagtggttaccctttttcctagatcccccagcaacacggtgcagtggactccaggtgctggggagagccgtgaccgtgagacccacctcaggtactgcaggttgcatttatgatttctgagcaggtcacacagcatcagcatcatcgtgcgttcccactcgatgtgccctgccagggtcaggtgcgtgagggtcttcttcccaatgaaagcaagacagaagtcccggtacgcggtgtcaggggtgacgtttttaatcctagggaaaagcagaagagattccacttggagtgattaatactcacattgtgtggaggcatgtataaacaaaaagctgtttcacatttagaaattattagaagttcttggccgggtgcagtggctcgtgtctgtaaccccagcactttgggaggctgaggcaggaggataacctgaggtcaggagtctgagaccaacctgggcaacatggtgaaactccatctctacaaaaaataaattagctggggccgaggcaggcagatcgcctgaggtcaggagttcgagaccagcctggccaacatggggaagccccgtctctactaaaaatacaaaaattagctgcacatggaggggcatgcttgtagtcccaggtattcgggaggctgaggtaggagaatcacttgaatccaggaggcagaggttgcagtgagccgagaccgcaccactgcactccagcctg[174 bp omitted]aaaactagccgggcgtggtggcgggcgcctgtagtcccagctactcgggaggctgaggcaggagaatggcatgaacccgggaggcagggcttgcagtgagccgagattgctgcactgcactccagcctggggaacatagcgagactgtctcaaaaaaaaaaaaaaaagtcaagaagcagaggatcaggaaaaacaactaaggggtactaggcttaatacttgggtgacaaaataatctgtacaacaaactcctatgacacacggttacctgtgtaactaacctgtacttgtacctactttttggtttgttttggtaacaaaacaaaccaaaaaaaagatagctggggccaggcatggtggctcatgcctgtaatcccagcactttcgaagaccgaggcaggcgcatcaccttaggtcaggagttcgagacaagcctggccaagatggagaaaattccacctctactaaaaacacaagattaagtcattgcactccagcgcctaggtgacagagtgaaactctgtctcagaaaaaataaaaaataaaaaaggggccaggtgcagcggctcatgcctataatcccagcactttggaaggccgaggcaggcaaatcacctgaggtcaggagctcgagatcagcctgggcaacacggtgaaaacctgtctgtgctaaaagtacaaaattagccgggcaaggtggcacatgcctgtaatcccagctactcgggaggctgaggcaggagaattgcttgaacctgggaggtggaggatgcagtgagctgagatcgcgccattgcactccagcctgggcaacaagagtaaatctccgtctcaccaaaaaaaaaaaaaaaaaaaaagacagctggaaaatccccaaatacatggagatgaaacagcacatttccaaatttaaaaaacaaaagtacaagaagcttagtcatcgttcagggtcttccttgcaagatgagcttctacttactccactttctgcagatgacaggtgctacgggttacgtggtcacaaagaatccgcacagaagagtcactcaggaagctttgtttcacttccagaaacttgaggttgctgtttgagctgaagagagagcagaaatctgtccagaggcgaagagagcgaagatcctgccgagcccagttcggaatggttaggtaagtgcacctgcaggagaacacacgttcatctcttaggactagtacctgcatggtgagatgggcatctgcaaaccacatttcaatggcaaaaaccacaattacttttgcaccaacctaaaacagtgtctatagtaaacaatattgcatcacatgctttgctaccagtatagatcttaagttttacaaaaaaaataaaataatagataaggctgagtgaggtggctcatgcctgtaatcccaacactttgctaggccaaagtgggaagatcacttgagcccaggagtttaagaccaacttgggctagaaactgagacccccatctctacaaaaaaataaaataattaaccgggcaaggtggtgcacgcccatagtcccagctactcgggaggctgaggcaggagaatcacttgaacccgggaggcggaggttgcagtgagccaagatcgcgccactgcactccagcctgggggacagagcgagactccgtctcaaaaataaaaagccccaattcctaattgccaagtcgtgtctccacgttgaacatgaagctggaaagaagtccagccagagggaaattctgacagtaagcgacagggcaaaggagacgctggcctcttcctagtggagcgtgggatgggaaaacagttcttacctttcaaattcaatgtccagttcaaaatccatgtaattctccaggaacaccccctttgctacctgcagtgagagtttctgcaagtcttgacaatgcttcaggctgaaggaacaatgcatcacttcagaagtatttgtcaggtgaatagaaatttccttgaacggggccaccaccaccttcgccagctcctcctcctgagactcatacaggcagcccaagacctccttcaggtcggtcacggataagggcttatttgcatgaagatgtgctttgcattgcagcaattcctgtttgatgtccggtgacatccggcagccaaaagtggcctccaactccttggctctcttctcgttagcgaggccgaataagaagtgtcctacttgaatcaggtcggggttcttgagtctttcttctccggaaagcagcttctgtacgtccccgatgtcccaggcgtggccgtccctgtcctccccctcctccttctccagggcgtagaacagggcagtgagaaactgctggaagctgaggtggatgaaggagtagcagcctttggagactctgtcctggcggaggatgtctccgtccaggaacagacggaggtcggactcctgcaccccgagcctttccaggtcctctcggtggaacacggacatctgcgcccacaggccctgcgcggccaggaggctcagcgtccgcagcgcgccccgcagctgtgcgccctgcgggaaccggctgcagaggaaacgcaggaacagccccgtgcgggtgaggcaggtggggaccgggtcctcccccttctccatctgcagcttcagagtcgtgcacacaatccagcacaccgcgggggccgagcccagctggaacagggccgcgttgctcctcattagctcaaaggcacgcatggcttggtcctcgtctccaaagtgtctcaggaaataggccctcctgtcctcctccaggaagccctccacccttacgtagatcggctgctgcgccaggagctggaggtccctcagtgccctgggccgcgtggtgaccagcaaggctgccctgggtaacatcttcctcttcagcaaactccccaggaggacgggcaccggcttcttcttctcccagtccccgcagatgtcctggatcagcgccccaggtgggactttcagctcatcaaggccatcgaccacgaacaggattctctgtgcttgggctaggatgcttggaatgtcatcctgcaattcaggccagtctttggagatcagctctgcaaaactgcaggggcccatgcggctgagctccttgcagctgaggtagaacgcgtatctgagcgtcgggctgaggttgcagtctgtccagtccagcatacactttttggccagcgtggttttccccacgcctgcggggccgtgcagcaccaccgtgtaaggtgttagcttcctgggtgttctgggattcaagaatggaatgaaccgttggtttctcagagtgacgtcgtcatggaaattgtcaatgtctccttgccaaaaggtgttcttccagaccaaagactgtttctccattgaatttctccatccttccttttcacctgcagtgacagcccataggacagttgaggttgatgatgatgattttctgaattattttgtcaagtaccagaaatgagggccaggcacggtgtctcatgcttgtaatcccggcactttgggaggccaaggtgggtggatcacttgaggtcaggagttcaagaccagcctggccaagatagtgaaaccccatctctactaaaaatacaaaacattagctgggggtagtggcggccgcctgtaatcccggctactcaggaggctgaggcagagaattgcttgaacccgggaggcagaggttgcaatgagcagagacggagccactacactccagcctgggctacagagcaagattccgtctcaaaaaaaaaaaaaactaccagaaatgaataaaaccaggaagaagtgatgcaccttgcatgctctcaaacaccaaactcatgaccataggaccgtatttacccacctggctttgctaactccgagtcttcttctgcatctcccagctcaggattatctatttcttgcacctgtccgtcctctgtaaaatacttagatgtaagcctgacacagtaatttacacttcgtaaatcagacattattgtacataaagtgtcagccaggcatggtggctcatgcctgtaatcacagcactttggaaggctgaggtgggcggatcacaaggtcaggagatcaagaccagcctggccaacatggcaaaaccccatctctactaaaaatacaaaaaaaaaaaaattagccaggtgtggtgaaacacgcctgtaatcccagctactccggaggctgagataggagaatcacttgaacccagaggcggaggttgcagtgagcccagatctcgccactgcactccagccttacactccagcctgggcgacagaacgagactccatctcaaaaaaaaaaaaaaaaaaaaaaaaatgaccaggacaccccaggttctacttacccatcatctcagcctttgccatcttacacaattccgtgagattcatctcttccaagatgttcacagtcgcattccttatccaattttctgaggaggtgttgaccagaatttctgccagtttcttgccatcagcctcttccacctcagaccatggggtcttctgtagcacgtcttcgaggggaaaagcccataaaagggatttgaaactctttaattcatcctcgttcagctgctccagaagggtctgcagagtccactctagctggggcgatgtcatagtgctccgagtatgagaccttaggttaaggctgaagaactggggggaaaaaaggaaaaacagttcacgagttaccatcattaaatgaaaccacagtttcctgtgtgccaagaacaagactgttcctgctgtacagtgagtggtaaaatattccaaagactgaattaagagactgaaaatctggcccagcacggtggctcacgcctgcggccaggagtt[146 bp omitted]cccctgcctctactaaaaaaatacaaaaaattagcagggcgtggtggcgggcacctgtagtcccagctactcgggaggctgaggcaggaga[132 bp omitted]gtcagtggtatgctagggccagcccgtgctgcctaatgggggcttcctatatgtacctataccaacgtccatgggctgtgatttcacactgatagtacaa[140 bp omitted]acggcgaaaccccatctctactaaaaatacagaaattacaggcgggtgcctgtaatcccagctactcaggaggccgagacaggagaatcacacttgaacctgggaggtggaggttgcatgatctgagatcacgccattgcactcgagcctcggcaacaagaacaagactctgtctcaaacaaacaaaaaaacaaatcagcaaacactacaaaccaagacttcctcgccaccaaccctcagagccacttgtttaacatttcagcccaccactgaatgacacattgaaaacaaatagcaagaggacagatataaatataactgtactggccgggtatggtggctcaggcctggaatcccagcactttgggaggctgaggcaggtggatcgcctgatgtcaggagtttgagacccgcctggcccacatggtgaaaccccatctctactaaaaatacaaaagctagccaagtgtagtggtaggaacctgtaatcccaggtacgtgggaggctgaggcaggagaatcgcttgaacccaggaggcggaggttgcagtgagctgagatagcgccattgtactccagcctgggcaacaagagcgaaactctatctcaaaaaaaaaaaacttagccaggcctggtggaacatacccgtagtcccagatacttgggaggctgacacaggaggattgtttgagcctacgatttggaggttgcagtgagccagccactgcacgccag[224 bp omitted]gctgaggcaggagaa[131 bp omitted]agaaaaagtgacttgccaagcccgggtgctgatagaggtggacagctttacccttggagggaacagcaaatctttttccccagctgtgacgtgtggggaaaaggaggacagatcagactgttactgtgtctatgtagaaagaaatagacataagagactccattttgttctgtactaagaaaaattcttctgccttgagatgctgttaacctgtaaccctagccccaaccctgtgctcccagaaacatgtgctgtgtcacacgtgggtttagggctatgcaggatgtgctttgttaaacagatgcttgaaggcagcatgcttgttaaaagtcatcaccactctctaatctcaagcacccagggacacaatacactgcggaaggctgcagggacctctgcctagaaaagccaggtattgtccaaagtttctccccatgtgatagcctgagataaggcctcgtgggaagggaaagaccagaccgtaccccagcccgacacccgtaaagggtctgtgctgaagaggattagtataagaggaaggcctttttgcagttaagaggaaggtatctgtctcctgctcgtccctgggcaatggaatgtctcggtgtaaaacccgatggtatgttccatccaccgagataggggaaaaccgccttagggctggaggtgacacatgctggcagcaatactgctctttaatgcaccagatatgtttatgtatgagcacatcaaggcacagcacatttcctaaccttgtttatgacacagacatttgctcacatgttttcctgctgaccctctccccactgttaccctattgtcctgccacatccccgtctccgagatggtagagataatgaccaataaatactgaaggaactcagagacccggccggcgcgggtctcctgagcccacttttctttctgtgtactttgtctctgtgtctctttcttttctcagtctctcgtcccacctgacaagaaacacccacaggtgtggaggggcaggccaccccttcagtgaggtataattacatatatcctattttaggatggagcaggaagagcatgagagcccaggagttccagaccagcctgggcgacacaaggagaccttgtctctattttttaagtatttttaaagtaatatatacaacgtttacttgtcaaagtgtacagcatggagcgatgttatatatacagtgaaatgattaccacaatccagctaattaacatatccactgcttcatatagttgcctttcgtttttgcagtgacaacgcttgatgtacttagaaaaattcagggttttttggccaggcacggtggctcacgcctgtaatcccagcactatgggaggcc[136 bp omitted]c[131 bp omitted]cagggttttttttttctttttcagaaagtcttgctctgtcgcccaggctggagtgcaatggtgcgaggcttaccacaacctcctcttcccgggttcaagcgattctcctgcctcggcctcccaagtagctgggattacaggtatgccccaccacacctaattttttttgtatttttagtacaaacggggtttcaccatgttggccaggctggtcttgaactcctgacctcaggtgatctgcccacctcagcctcccaaagtgctgggattacaggtatgagccaccaggcctggccaagtattttttttcccaagtacatttttttctttttttcttttttttgagatggagtctccctctgttgcccaggctggagtgcagtggcacaatctcgactcactgcaacctccacctcccaggttcaagtgattctagtgcctcagcctctcaagaagctgggattacaggcgcaccgcatcacgccgggctagtttttgtattttta[145 bp omitted]gactacaggcgcccgccactatgcccagctaattttttttgtatttttagtagagatggggtttcaccgtgttagccaggatggtctcgatcttctgacctcgtgatccgcccgcctcggcctcccatagtgctgggattacaggcgtgagccaccgcgcccggccgag[136 bp omitted]atgcagcatttcactctggttgcccaggctggagtgcagtggcgcaatctcagctcaccgcaacctccgcctcccgggttcaagtgattctcctgcctcagcctcccgagtagctgggattacaggcatgtgccaccacgcccagctaattttgtatttttagtagagatggggt[132 bp omitted]ctggagtgcagtggctcaatcacacctcattgcagcccccacctcctggctcaggtgatcctcccacctcaccccacaagtagcttggacacagcacaaggtctggccttctttgttttttgagacggagtcgcactctgtctcccaggctggagtgcagtggcgcgatctcagctcattgcaacctccccctcctaggtttaagctattctcctgcctcaaccttccaagtaactgggattacaggcatgcaccaccacacctggctaatttttgtgtttttagtagagacagggtttcaccattttgggcaggctggtctcaaacttctggcctcaagtgatccacccgcctcggcctcccaaagtgttgggataacaggcatgaaccactgtgcctggccttatatttttttgtaatgacagagttttaccatgttgcccaggctagtctcaatctcctgaactcctctaaactatatttgaatagaagtccttaagacattaggccaggcgtggtggctcacacctggaatcccagcactttgggaggccgaggcagacagattacctaaagtcaggagttcaagaccagcctggccaacatggtgagaccccgtctctactaaaaatacaaaaattagctgggcatggtggcacgtgcctgtagtcccagctactcaggaggctgaggcaggagaatggcgggtgaacccaggaggcggagtttgcagcgaaccaagatcacgccactgcactccagcctgggcgacagagggagactccgtctcaaaaaaaaaaaaatcaaagatccttccagcatcctcgcaccaaccattaaggcttgggaagggctatggtggaaactcaaccaatagcttcttctcccttaaacgagaagacaaagaaatcgatgcaagaaccagcactcacctccctcaggtcaggtcttgcttccagcctgtgtttcctgcaaaggaaacggataaaaaggggaggtctctggcccttggtacgctaggtggagagacagctttcccgcccagggtggaaccgccccactgagattaacattgggtggctcccaaccactgacctcaggctcaccttgacatcacctgggccccatcctcagggatttggctgtaattgggcttcagtgggctttggagaattacggcttgctgaatctccccaggtgagattaatgtgcaattcccttcctagaccacccgggccaggtgtgataggcgacagaacaggaaatacacattttgggttttgcagggtacctggctcccagctttaaaaactcttgtagagaaaaaaaattaaacaaaaataaataaaaattaaaaaaaaagaggacaaaaactcccgtgacttcctaagttacaaatacaataagtctactttgtggccaactgtggtgcctcctgcctataaatcccagcaggctgagaggcctaggccagtggatccctaggggccaggagtttgataccagcctaggcaacatagcaagatgccatctcttcaaaaatatttaataattagccatgcataggctgggcgtggtagctcatgcctgtagtcccagcaatttgggaagccgaggcgggtggatcacctgaggtcaggagttggagaccagactggccaacgtggtgaaactctgtctctactaaacatacaaaaaattagccaggtgtggtggcaggtgcctgtaatcccagctactcgggaggctgagacaggacaatcacttgaactagggaggtggagggtgagtgaggcacgatcacgccattgcactccagcctgggtgacaagagcaagactgtctcaaaaacaaaaacaaaaaaattagccatacatgatgggctgcacctgtaatcccagctattcaggaggctgaggtgggaggatcacctgagctcaggagtttgaggctgcagtgagctgtgactggccatctcactccagcctaggccacagagtgagacccagtctcaaaaaaataaatagataactgatatttaatttttttttttggatggagtcttgctctgtggcccaggctggagtgcagtggtgcaatctccattcttgcaacctctgccttccaggttcaagcaattctgatgcctcagcttcccaagtagctgggactgcaggcacatgccaccatgcccaactaattttttgtatttttagtagagacagggtttcaccatattggtcaggctggtctcaaactcctgatgtcaggtgattacaggcatgagccaccgcacctggcctaaaattgtttttaaataaaacagtgtatgttgtggaaagcattcagcacagaattttggtagtttaaactgttaatttaatggaagcaaatggtcccacaaatgaagatgtatatatcagttgcagcatgccatctatagaaataggcactatggaggcctggcatggtggctcacacctgtaatccctgcactttggaaggctgaggcaggtggatcatctgaggtcagcagttcgagaccaacctgggcaacatggcaaaaaacccctggctactaaaaataaagaattagccaggcatggtggtgtgcacctgtaatcccagctactcaggaggctgaggcgtaagaattgattgaacctgggagttggaggttgccgtgagccgagattgcaccactgcgctccagcctgggcgacagagactccatctttaaaaaaaaaaaaaaaagatggccaggcgcagtggttcatgaatgtaatcccagcactttgggaggctgaggcgggaggactgcctgagtccaggagttcaagaccagcctgggcaatatggcgagactccctctctgaagaaaaagaaaataaaaacaataaaaataaattatattctagctgacaaaaagagagagagagtatattttgttaaaacatttggcctttagtcctagagcagctatggagagataaacatgaaagaggtatctcttgttatacatacccaggccctgcaaccacacctgagtttatgtaaatgaggtgacttttggaaagcccctagataaccccacaagtgcgagggactggctgccaaagaaaccgtcagtgattagacattgggaactttcagccccaggctccaagtggcctccagggaggggagaggggctgaaggttgaattgattatgaactgccagctatgtgatcagcattgcccacctaaggaatcctccataaaccccaaaagaaaagggtttgggccgggtgtcctgtggctcatgcccgtaatcccaacgctttgggaggcctagatgggaggattgcttgagcccaagaattctaggccagtctggacaaaatagcaagaccctggctctacaaaaaataaaaaattagccaggcgtggtggagtgcacctgtagacccagctactcaggaggctgaggcatgagaatcacttgaacgcaggagacagaggctgcagtgagctgagatagcgccactgcactccagcctgggtgacggagttagactgtctcaaaaaaaaaaaaaaccaggaaagagttcagaagagcttcctggttggtgaacccgggtgcattcgtgtgccaggactgtggtgcaccccaggtccacagggacagaagctcctgcacttcggactcctctaaacctccccctacgcatctcttccttggctgttcatttgtatcctttaaaatatgaaagggcgggttgcccctccacacctgtgggcatttctcgttaggtggaaggagagacttggaaaagaaagagacacagacaaagtatagagaaagaaataaggggacccaggggaccagcattcagcatatggaggatcccgccagcttctgagttcccttagtatttattgatcattttggggtgtttctcagagagggggatgtggcagggtcataggataatagtggagggaaggtcagcagataaacacgttaacaaaggtctctgcatcatagacaaggtaaagaactaagtgctgtgctttagatatgcatacacataaacatctcaatgccttacggagcagtattgctgcccgcatgtcccacctccagccctaaggcggttttcccctatctcagtatatggaatatacaatcggggtttacacccatacattccattgcccagggacgagcaggagacagatgccttcctcttgtctcaactgcaaagaggtgttccttcctcttttactaatccgcctcagcacagaccctttactggtgtcgggctgagggacggtcaggtctttcccttcccatgagaccatatttcaggctatcacatggggagaaaccctggacaatacctggctttcctaggcagaggtccctgcggccttccgcagtgtttgtgtccctgggtacttgagattagggagtggtgatgactcttaaggagcatgctgccttcaagcatttgtttaacaaagcacatcttgcacagcccttaatccatttaaccctgagtggacacagcacatgtttcagagagcacagggttgggggtaaggtcatagattaacagcatctcaaggcagaagaatttgtcttagtacagaacaaaatgaagtctcctgtgtctacttctttctacacagacacagttacaatctgatctctctttcttttccccacaaaaatatcctttgtagaccaggcacagtggctcaggcctgtaatcccagcactttgggaggctgaggcagatggatcacttaaggtcaggagtttgagaccagcccagccagcatggtgaaactgcgtctctacaaaaatacaaaaattagcggggcatggtagttcaacgcctgtaatcccagctactcgagaggctgaggcagaattgtttgaacccgggaggcagaggcagaggttgcagtgagccgaggtcgcacgactgcactccagcctgggtgcaacagagtgagactccatctcaaaaaacaaaaaacaaaaacaaaaacaaaacaaaaaatgaaaacccacttttagtaaaaaaaataaaaatgaaaaaatgtgaatcaggctgcactctggcccacatcctggctgctgtgtatcacgtggctctagacactgcacttttgcctcctcatcattgctgtagataggatttctgacagcagggtcattagacgaatttttttttttttttgagacggagtctcgctctgtcgcccaggctggagggcagtggcgcaatctctgctcactgcaagctccgcctcccgggttcacacaattctcctgcctcagcctcccgaatagctgggactacaggtgcctgcaacca[187 bp omitted]tctgggacattagaattataaggcttttgtttaaggatggtttcagatgtttttcagaccttgaattccagccaaatagctgacactaaccagtttgaagaccccagtgaggaatgggatcagcatgagaacactgcgtcttcatgcccctgtctccgccagcagtcagcatggccacactctggcccacaccaaaacacttaaaaaccctagccccggccgggtgcagaggctcacacctgtaactccagcactttgggaggccaaggcaggtgaatcacctgaggtcaagagttcaagaccagcctggccaacatagtgaaaccccgtttctactaaaaacacaaaaaattagtcgggcgtggtagcgggtgcctgtaaccccagctactcaggaggctgaggcaagagaattacttgaacctgggaggcggaggttgcagtgagcaaagatcctgccactgcactccagcctgggtgacaaagcaaaactccatctcaaaaaaaaaaaaaaccctagacccaaacttctgggggagatggattggaggtttcctcccatctcctcattcctcagccctgtgattaaacttccttctcttctgcaacacagtgacccggcaaattgactcacagcgtgcattgggcaacggacctactgtcagaggcgtgtaaccagggcaactccatcttgaataggagctgactaaaataaggctgagacctaccgggctgcattcc[132 bp omitted]ctctactgaaaatacaaaaattagtcaggcgtggtggctcgtgcctgtaatcccacctacttgcgaggctgaggcaggagaatcgcttgagccggggaggcggaggttgcagtaaaaagaaaaaaaaaagcattctaagtcacaggatgagataagtcagcacaagatacaggtcataaggaccttgctgataacacaggtagcaatgtagcaggaccagccacagacaaaactcctcagacaccgagttaaagaagaaaggggtttatccggccaggggcatcggcaagactcccgtctcaagagccgagatccccaagtgagcaattcctgtcccttttaagggctcacaactctaagggggtgtgcgtgagagggtcgtgatcgactgagcaagcagggggtacgtgactgggggctgcatgcactggtaatcagatccaaacaaaacaggatagggattttcacagtgcttttctatacaatgtctgtaatctatagataaccgattaggtcaggggtcaatctttaactaccaggcccagggtgtggcgccgggctgtctgcttgtggatttcattcctgggccgcggggctgtctgcttgtggatttcattcctggggcgcggggctgtctgcttgtggatttcatttctgccttttagtttttactttttctttctttggaggtggaaattgggcataagacaatatgaggggtggtctcctcccttagcaataaagaatccagccaggccgggcgcggtggctcacacctgtaatcccagcactttcgggggctgaggcgggtggatcacacggtcaggagattgagaccatcctggctaacacggtgaaaccatctctactaaaaaa[142 bp omitted]tgacagagcgagactccgtctcaaaaaaataaaaaataaataaaaataaataaagcatccagtcaaactccatcaaaaccaagatagtgacgagagtaacctctggttgtcctcaccgctccactcccagcagccccatgacagtttacaaatgccatggcaatgtcaggaagttaccctatgctgtctaaaaaggggaggcatgaataatccaccccttgtttag[147 bp omitted]ctactaaaaaaaaatacaactaattagctgggtgcggtggcgggcgcctgtagtcccagctactcgggaggctgaggcaggagaatggcctgaacccaggaggcggagcttgcagtgagccgagatagtgccactgcactctggcctggtgaaagagcgagactccgtctcaaaaaaaaaaaaaaaaaaaaaaaagggcaaccgaggccggacgtggtggcttacgcctgtaatcccaacactttgggaggccgaggcgggcatatcacctgagctcaggaggtcaagatcagcctggccaacatggtgaaaccccatctcttactaaaaatacaaaaattagccagacgtgatggcaggcacctgtaatcccagctactcaggaggctgaggcaggagaatcacttgaactgaagtgattcaaggcagaggtttcagtgagccaagatcacgccactgcactccagcctgggcgacaagagcaaaactccatctcaaaaaaaataagggcaactagcagccctatgggctgctgtctatggagtagctattcttttactccttcactttcctaataagcttgcttccactttactccatagtctcgccctgaattctttctggtatgagattcaagaacccaccatgcccagctcgtccttacttgcttttaaaaaatatcattggtggccgggcgcggtggctcacgcctgcaatcccagcactttgggaggccaaggctggcggatcacctgaggtccgaagtttgagaccagcctgaccaacatggagaaaccccgtctctactaaaatacaaaaaaattagctgggtgtggtggtgcgtgcctgtaatcccagctactcaggaggctgaggcaggagaatcacttgaacccgggtggcagaggttgcagtgagccaagatcatgccattgcactccagcctgggcaacaagagtgaaactccgtctcaaaaataaataaataaaatcattggaataattttcttctttaggaagagcagccttgggccaggcatggtggcacatgcctggaatccccgaactttgggcagcccaggtaggtggattgcttgagttcaagagttccagaccagcctggacaacatgatgaaacctcttcttgatcaaatatacagaatttcgactgagcacagtggctgtaagcccagcatgttgggaagctgaggtgggtgaatcatttgaggtcagaccagcctgactaacatggcgaaaccccatctctacaaaaaatacaaaagttagccaggaggtcgtgggcgcctgtggtcccagctactcgggaggctgaggcaggagaatgacgtgaatcccggagtcgtaggttgcagtgagccaagatcgtgccactgcacttcagcctgggcgacacagcaagactgaggttgcagtgagctgtgatcctcaacctcctgggttcaagggattgtcgagcctcagcctcccaagtagctgggattatagacattcgctcccatgcctggctaatttttgtattgcaaaaatgcactccagcctagatgacaggactgcactccagcctggatgacagagcaagactgtgtctcaaaaataaataaataaataaataaatagccaactgtgatcgtgcatgcctgtagtcccagctactcaggaggccaaggcaggaggatcacttgagactgggaggtcatggctacagtgagccatgatctcgcaactgcactccagcctgggcaacagagggagagaaaggaaggaaggagggaaggagggaaggagggaagggaaggagggaaaggaagtcagtcttgtgggacaaggaaggaaggaaggaagtcagtcagtcttgtgggactcagccctgaacctttgggatctgatgctgtccccaggtagggagtgtcagaactaaatcaaaggagaggacacccagctggtctctgctggagaactggttgttggtggggagaaacatacatttttggtgaagtattctgtgttgagtgtgaaagtaggaaaaacaggactgggtatggtggttcatgcctgtcattccaggattttgggaggccaaggcaggcggatcacttgaggtcaggactttgagaccaccctggtgaacatggcaaaaccccatctctactaaaaaaaaatacaaaaattagctgggcgcggtggcaggtgcctgtaataccagctactcgggaggctgaggcaggagaatcacttgaacccgggaggcggaggttgcagtgagctgagattgtgcctttgcactccagcctgggagacagagcaagactctccctcaaaaaaaaaaaaaggccgggcgcagtggctcacgcctataatatcagcactttgggaggccgaggcaggtggatcactgacacccaacaccacgccttctaattttttgcatttttagtagaaacggggtttcaccatgttggccaggcttgtctcgaactcctgtcctctggtgatccacctgccttggcctcccaaagtgctggaattacaggcgtgaacccagcaacttttcccccttttatcataccttaatttgcctccaccacccccagaagctccaagtctctacgccttttcatttatgtatgtatgtatttatttatttatttatttattttattttgagacagggtctccctctatctcccaggctgcagtgcagtggcgtgatcttggcccactgcaacctccacctcccgggttcaagtaatcctcctgtctcagcctcccaagtagctgggattacagggcacaccaccacacctggctaatttttgtatttttagtggagactgggtttcaccctgttgtccaggctagtctcaaactcccgacgtcaggtgatccacccatttcggttcccaaagtgttgagattacagaccgtgagccactgggacggacacccctactcctttcttcttcttcttctttttttttttttttttgagatggagtctccctttgaagcccaggctggagtacaatggtgcgatcttagctcactgcagtttcctcctcccgggttcaagtgattctcctgcctcagcctccggagtagctgggattacaggcacacaccaccacaccagctaatttttgtatttttagcagagatggggtttcaccatgttggccaggctggtctcaaactcctgacctcaggtgatccacccaccttggcctcccaaactgctgggatcacaggcgtgagccactgcaccctacactcttatactcctttctgtagctcaggcagctagatgagcttcaatcatctggcccttcctccagtctcacatttttgtgggactcctgtgcatacataattgaatctggtttttcttctgtcaaactgttttgtgtcaatgtaattcatagcccatccaaagaacctaggagggtggagggaatccattttctctcctccacactggagggccatggagcccaagagttcaagactggcccggtgtacaaagtgagacccagtctctatttaaaaaagatggggagggggccgggcacggtgtctcacgcctgtaattccagcactttgggaggcccaggtgggtggatcacctgaggtcaggagtccgagactagcctggccaaggtggtgagaccgtgtctttactaaaaatacaaaattagcttggtatggtggcaggagcctgtaatcccagctacttggaaggctagggcaggagaatcgcttggtttgggattttctccctgaggcacttgctatctccaggattatgggtctcaggtgaaagaaagacaaagaaggagagagagacagagagggacagggaaagagaatttcagacttatctaacattgacacttaggagaagtagggagaaagaggtgggaaaataaagtggctaggtaaaaatgaacatgtcagtaacaataatagcattaacaataactagtattgccgggtgcagtggctcacgcctctaatcccagcactttgggacgccgaggtgggcgaatcacaaggtcaggagttcaagaccagcctggccaacatggtgaaaccctgtctctactaaaaatacaaaaagttagctagctgggcatagtggtgcatgcctgtaatcccagctactctggaggctgaggcaggagaatcgcttgaacccgggaggcaaaggttgcagtgagtcaagatcaggccactgcactccagcccaagggacagagtgagactctgtctcaaataataataataataataactagtggccaggcacagtggctcacgcctgtaatcccagtgtagcaggacgagccacagacaaaaacctctcagacaccgagttgtagaaggaagggctttattcagctgggagcatcggcaagctactgtcttaaaatccaagctcctcgagtgcacagtttctgtcccttttaagggctcacaacactaaagactgcgcatgaaagggtcatgattgagcaatctaggggatacataacaggggtttcgtgcactgctggtcagagagaaagaatagggcagggagtttcacagtgttcttctatacaatgcctggaatctatggataacatcgggttctaagtcatgagttgatttttatctactaggtttacgccaggcaggcccaggcctggtttcgggtctggttttgggtctggtgcctggcgccgggctacctgcctttggtttcacttccttgtttttttctttttctttttttttttttttgagacagagtcttgctctgtcgctaaggctggagtgcagtggcacaatctcggctcactgcaagctccgcctcctggattcaagcaattctgctgcctcatccttccgagtagctgggattacaggcgcacgccaccatgcccggctaatttttgtatttttaatagagacggggtttcacc[139 bp omitted]tataaaacaatatgagacggtttctctcttccctcaccagcactttgggaggctgaggcaggtggatcacaaggtcagagtggatagcactttaggaggttgaggtgggaggatcccttgagcccaggagctcaagtccagcctgggcaacatagcaagacccccatttccaattttagtgtatgtgctgccaaagcaaatactctgagaccctgtttctacaaaaaataaaaaaattaaaattagtgcttggaaaaaaaaattagtgcttgaccaggaggcaagcacacctcctcatcctctcatggatgtctgtctgtagaaagtaaatggagacagcttcattttacccaactgctccgttttaggtccgctcctgagcttctgttgttcccagccatgcaaccctgggagccgactcccggctgcagagccttgtcagaagcaggcaatgtacacagagacccaaggcctggtgtagacaggctttcacagacctgggcattttgttgaattgtttttgaattgtggtttcttatcagttcatccgatactctgttctaaccacgtagttcctcttttggatctccaaacccctttgcaggttccatctacccgaaccaaactcacttattccaacagaagtctggtgtttcttgttttttttgtttgtttgtttctttcgttttgttttttgagatgttgtctccctctatcacccaggctggagtgcagtggcgagatctcagctcactgcaacctctgcttcccgggttcaagcaattctcctccctcagcctcctgggtagctgggattacaggtgcctgccgccacacccagctaacttttgtatttttagtagagacgggatttcaccatgttggccaggctagtctcgagctcctgacctcaagtgatccacccatctcagcctcccaaagtgctgggattacagccttaagccaccgcgctcaaccagaagtctgtttaaatccatccttctccccagccacccatgagttatgtgaccttggggttgctacttaacatttcagtctcaatttcctcaatagaacaaaagttagaagaattgtaacaaaagatagttttatttttatttttatttttattttttgagatggagtcttgctctgtcacctaggctggagtgcagtggtgtgatggtggctcactgcaagctccgcctcccggattcacgccattctcctgcctcagcctcccaagtagctgggactacaggcacccgccac[185 bp omitted]aaaatattctatataattccaaggtcaaagaagaaataacaaagggcatttttaaaaatgctagaactgagtggtggtgaaattgctgttgaaatgtgtttgttgcactgatggaaatttataaatgtaaatatttatattaaaatataaaataatgggccaggcatagtggctcacacctgtaatctcagtactttgggaggccaaggcgggagggccatggagcccaggagttcaagaccggcccggtgtacaaagtgagacccagtctctagttaaaaaagagggggagtgggccaggcacagtgtctcacgcctgtaattccagcactttgggaggccaaagcaggtggatcacccgaggtcaggagtccaagaccagcccggccaaggtggtgaaaccccgtgtctactaaaaatacaaaattagcttggtatggtggcgggagcctataatcccagctagggcaggagaatcacttgaacccgggaggcagaggttgcagtgagccaagatcatgccactgcactccagcctgggcaacaacagagagacttcatctctaaataaataaataaataaataaaagaaaatacaaattttttaaaaaaggtactgtggctgggcgtggtggttcacacctgtaatcccagcactttgggaagccgaggcaggtggatctcagatcaggagttcaagaagagcctggccagcatggtgaaaacctatctgtactaaaaattagcctggcatggtggcaggtgcctgtaggaggctgaggcaagagaattgcttgagccccggaggcagaggttgcagtgagccgagaccacaccactgcactccagcctgggcaacagagcgagagtctgtctcaaaaaggaaacaaaaaaaaaagtacctccaaattatggtagggtgtccatattaagaaggtagaaaaaggtcgggggaagtggatgcctgtaatcccagaactttgggaggctgaggcgggtggatcacctgaggtcaggagttcaagaacagcctggccaaaagggtatggtgaaaccccatctctactagaactacaaaattagccgggcgtggtggtacatgcctgtaatcccagctacacaggagtctgaggcaggagaatcacaggaaaccggcaggcagaggttgcagtgagctgagatcgcgccattgcactccagcctgggcgacaagagcaaaactccatctcaaaaaaaaaaaaaagaaaaaatgaaaaagaatttattgaaatgtgcagtctgaaaactgctcctgcacattttcattcatccttcctattccctccatccctcaattttttttttttttttgagacagagtttcgctcttgttgcccaggctggagtgcaatggcacgatctcagctcactgcaacctctgcctcccaggttccagccattttcctgcctcagcctccagaatagctggaattacaggcatctgccactacgcctggctaattttttgtgtatttttagtaga[144 bp omitted]tttgtttgtttgtttttgagacagagtcttgctctgtcacccaggctggagtgcagtggcgcgatctcagctcactgcaagctccgcctcccgggttcacgccattctcctgcctc[217 bp omitted]gagcgcggcagtgaagagctgggcttccggaagctgacagctgtttgtgatcttcaagacctcagacaggttttctaaatatgccttgccttcattttctcaaggaaagtgaaaaatgggtaggatcatggcaatcactactgtgtagcaatgtttagaggacttaataagtaaacacagggtcaagcatggtggctcacaccggaaatcccagcactttgggaggccgtggtgggaagattgcttaagcccatggggttgagaccagcctgggcaacatagtgagacctccatctctataaaaaatacaaaaatctagtcaggcgtgatggcgtatgcctgtagccttcagtaagctatgattgtgccactgcacaccagcctaggcgacagagtgagaccctgtctcaaaaagaaaaaacgaaaagaaatatagatgtacatatacatatgttggttctaaaacatgaaaaaggctgggcgcggtggttcgtgcctgcaacccaagcactttgggaggccgaggcgggcggatcacgaggtcaagagtttgagaccagcctggccaacatagtgaaaccccatctctactaaaaatacaaaaaaaaggctaggcgcagtggctcatgcctgtaatcctagcactttgggaggccgaggtgagcagattacctgaggttgggagttcaagaccaccctgtccaacatggtgaaaccccatctctactaaaaataagaaaattagccgggtacagtggcacgcgcctgtaatcccagctattcaggaggctgaggcaggagaatcgcttgaactctggaggcggaggttgcagtgagccaagattgcgccactgcactccagcccgggcgacagtgccagactcagtctcagaaaaaaaaaaagcaaaacaaacaaagaaacatgaaaaaaagctataaaacccaacttttttctttttttttttgagacggagtctcactctgtcgcccagggtggagtgcagtggtgcggtctcggctcactgcaacctccgcctcctgggttcaagcaattctctgcttcagcctcccaagtagctgggattacaggcacccgccaccacgcccgactaattttttgtatttttagttgagacggggtttcatcatcttggccaggctggtcttgaagtcctgacctcgtgatccacccgccttggcctcccaaagtgctggaattacaggcgtgagccaccgcgcccggccaaaacccaactttttagtc[433 bp omitted]tggccagcatggcaaaaccccgtctctattgaaaaaaatacaaaaattaaccaggcgttgtggcgcatgcttgtaatctcagctactcgggaggctgaggcaggggaatcacttgaagccggcaggcggaggctgcggggagccgagatcgtgccgttgcactccagcctggggaacagagcaagactccattaaaaataaaataataataatactgtgaatgtgaaactgatgaacttggtgcttttcatgcgtctcatagttgacgtgtcattgatatttcacttgaaatacggttggatttttattaataatatacctggggtgatgggagaaggtagccaatcacagctgaggcttctaagcggtgattctcagcctcggccgcaatcacaattatctgggactctcgaaagaactccagggtctgggcagtcccagtgtaaccaatcaagcagaatctctaggcgttcgtgctttgaaatgaggctccacataggtaagtttaacaggcagtcaagatggaggaccacaggtggagatcgggaagctcaggtgaaggaccgccccccaacaccccccgcccccaaaagacctctcagtaattccggtggatacaggaagtgctcagcaacgattacgccccgagggccaatcacagggctgcggccgagaaagaagccttaatagagctttctcaacctgcagccctcatctccgccggcgagtagggccaggtgttgggaggtgagtagctctccggcagctctgcaacttcatttctttatttctccattcc[144 bp omitted]gcctcccgagtagctgggactacaggcgcccgccaccacgcccggctaattttttgtatttttagtaggtggctcacgcctgtaatcccagcactttaggaggctgaggctggcagatcacctgaggtcgggagtttgagaccagcctggccagcatggcaaaaccccgtctctattgaaaaaaatacaaaaattaaccaggcgttgtggcgcatgcttgtaatctcagctactcgggaggctgaggcaggggaatcacttgaagccggcaggcggaggctgcggggagccgagatcgtgccgttgcactccagcctggggaacagagcaagactccattaaaaataaaataataataatactgtgaatgtgaaactgatgaacttggtgcttttcatgcgtctcatagttgacgtgtcattgatatttcacttgaaatacggttggatttttattaataatatacctggggtgatgggagaaggtagccaatcacagctgaggcttctaagcggtgattctcagcctcggccgcaatcacagttatctgggactctcgaaagaactccagggtctgggcagtcccagtgtaaccaatcaagcagaatctctaggcgttcgtgctttgaaatgaggctccacataggtaagtttaacaggcagtcaagatggaggaccacaggtggagatccggaagctcaggtgaaggaccgccccccaacaccccccgcccccaaaagacctctcagtaattccggtggatacaggaagtgctcagcaacgattacgccccgagggccaatcacagggctgcggccgagagagaagccttattagagctttctcaacctgcagccctcatctccgccggcgagtagggccaggtgttgggaggtgagtagctctccggcagctctgcaacttcatttctttatttctccattcc[131 bp omitted]ttctcctgcctc[136 bp omitted]tacaggcgtgagccaccgcgcccagccttttttttttttttttttttttttttcttctcttttttgagggtcttactctgtttcccaggctggagcgctgtggcaggatctcggctcactgaacccttgacctctcaggttcaagcagtcctcacgcctcagcctttgaagtagctgggaccgtgggagggtgccaccacatctgttctggctaataatattattattaccactgtttgcagagactcactagatgtagggtcttaatatgttgccgaagctggtctctaactcctgggctcaagcgatcttcctgcctcagactcccaaaattctgggattataggcaggtgccaccgcgcccggcctaaatcttttcttctgttagaaattaagtggttctgcctgtctcagtggctcacgcctgtaatcgcagcgctttgggaggccgaggcgggaggatcacctgaggtcgggagttcgagaccagcctgaccaacatgtagaaaccccatctctactaaaaatataaaattaggtgggcgtggtagcgcatacttgtaatcctagctactcaggaggctgaggcaggagaatcacttgaacccgggaagcggaggttgcggggagcctagatcataccattgctctccagcctgcgcagcaagagagaaactgtctcaaaaaataaaataaaataaaattcagtggttctgactggggaaagagtagcagatgcttagatctagagagactctagttaaggttggctcataagaggatagttgtgtgtgcttttatttctgttctcttgggggatttaggatagagctatagagagctccaaaaaaaaaaatatattggaacaggtcagatgctgtggttgctgtgtgtggagtcctgggcagtgctaaggttttgtgtctaatgagtcctcttaacaagaaggtattgttttttattcactgaggtgagggagcctcttagcatcattctagtccagcttccggacctgagtcttatgcaaatacctatgccagttgccattctcacgctattcacagctatcatataaagaggtgttataccctttctgtaaagtttttgttgctactgctatttttttttttttttttttgagacaaagtctagctctgtttcccaggctggagtacagtggcgctatctcagctcactgcaacttccacctcccaggttcaagcaattctcgtgcctcagccttctaagtagctgggactacagccgcctgtcaccaacctggctaattttcgtatttttagtcgatatagggtttcactatgttggccaggctggtctcaagctccagacctcaggtgatcctcccaccttggactcccaaagtgctgtgattacaggcgtgagccaccgcacccggccctgttgtttttaaaatagagacagggtcttaagttgccaggctggtctggaacttctggactggagtgatcacccacctgagcttcccaaagtgcggggattgcaagcgtcagccaccacccccagtgttgtgtttttgtttgttttaccaggctggagtgcagtggtgcgatcacagctcactgcagccttaacttccctggctcaggtgatcctcccacctcagcctcctcagtagctgggactacaggtgcatgccactatgcccagcacaattttttttttttttgtatttttttgtagagacagggttttgccatgttgcccaggctggtctcaaactccaagcaatcctcccaccttggcttcccaaagtgtttggggttccaggtgtgagccatggccccccggccagcttcagtaaagtaaaagccacacacctgtgtcctgagaccaggctccaccactaagttatctttaagccttttttttttttgagacagtttcactcttgtcgccccaggctggagtgcagtggcgccatgtcagctcaccacaacctctgcctcccactcccaggttcaagcgattctcctgcctc[168 bp omitted]caccgcgcccggctgtgtgtttgcattatcatattcagcccagttttcacgaagtttcttgtctcctgggtgatccacgtagctccccacttccttatctgatctatgcttgtcctttcattgttgtgttactactttgctataatgagagagtgttttcgctttataggttaacttttagaacctgagcagcccctcagggaaaaccctgacagtagctggttattttgcaattagaaaaactagctgggcactgaggcaggtgaatcacgaggtcaggagttcgagaccagcctggccaacttggtgaaaccccccatctctactaaaaatacaaaaaaattagctgggcacagtggtgaatgcctgtaatcccagctacttgggaggctgaggcaggagaattgcttgaatccgggaggcagaggttgtagtgagccgagattgcagcactgcactccagccagggtgacaaagtgagactccgtctcaaaaaaaaaaaaaaaaaaaatacaaaaagtagctgagcgtggtggtgggtgcccataatcccagctagtcgggaggctgaggcaggagaactgtttgaacctgggaggcagaggttgcagtgagctgagatcgtactactgtactccagcctgggctgcagagtgaaactatctcaaaaataagtaaataaaagtaaaatgagttgaggtcttgctctgttgcccagatgggagtgcagtggcacaatcaaggctcactgcagtttcagtctcccaggctcaagcaatcctcccactgcagcctcctgagtagctgggactacaggcatgtaccaccacccactgctaacttatttttcatggagatgggggtctcactatgttgcccaggctgggagtttgttcttgaagaagcagggtagatggtgagtgtccttgttcgtggcacagcaggaactggcatttgagacaggagtgctaatcaccatccctctccactcctcccttgattgtcatcacagctcccacgtgggacaagatggtgtcttcggcgcagatgggcttcaacctgcaggctctcctggagcagctcagccaggatgagttgagcaagttcaagtatctgatcacgaccttctccctggcacacgagctccagaagatcccccacaaggaggtagacaaggctgatgggaagcaactggtagaaatcctcaccacccattgtgacagctactgggtggagatggcgagcctccaggtctttgaaaagatgcaccgaatggatctgtctgagagagcaaaggatgaagtcagaggtgagtggaaatcggtccacactgtgtcctaggaggaagcaggcgtcctctccaggactttagaaattcagaaggccaggcgcgctggctcacgcctgtcgtcccagccctttgggaggctgaggcggttggaccacctgagggtcaggagtttgagaccagcctgaccaacatggtgatgaaacagcatctctactaaaaatacaaaaatttgctggacgtggtggcagacacctgtaatcccagctactccgggaggctgaggcaggagaatcacttaaatctaggaggcgggggttgctatgagccgagatcacgccattgcaccccagcctgggcaacaagagcaaaattctgtctcaaaaaaaaaaagaaatggcattgaggcttggagagggactgcttgttctgaatgcaggtgctggatcttcataaaccctggtgtctgtcctggtccttattttctacctacttctttttttttttttttttgtccttttatttttttattttttattttattattattattttttttattatactttaagttttagggtacatgtgcacattgtgcaggttagttacatatgtatacatgtgccatgctggtgcgctgcacccactaactcgtcatctagcattaggtatatctcccaatgctatccctcccccctccccccaccccaccacagtccccagagtgtgatgttccccttcctgtgtccatgtgatctcattgttcaattcccacctatgagtgagaatatgcggtgtttggttttttgttcttgtgatagtttactgagaatgatggtttccaatttcatccatgtccctacaaaggacatgaactcatcattttttatggctgcattgtattccatggtatatatgtgccacattttcttaatccagtctatcattgttggacatttgggttggttccaagtctttgctattgtgaataatgctgcaataaacatacgtgtgcatgtgtctttatagcagcatgatttatagtcatttgggtatatacccagtaatgggatggctgggtcaaatggtatttctagttctagatccctgaggaatccccacaccgacttccacaatggttgaactagtttacagtcccaccaacagtgtgaaagtgttcctatttctccacatcctctccagcacctgttgtttcctgactttttaatgatcgccattctaactggtgtgagatgatatctcatagtggttttgatttgcatttctctgatggccagtgatgatgagcattttttcatgtgttttttggctgcataaatgtcttcttttgagaagtgtctgttcatgtcgttcgcccactttttgatggggttgtttgtttttttcttgtaaattattttctacctatttctatcgctttcaggtatcgtacagttggcctaacatatctgtggatttaaccaatcctagatcaaaaataatgggggcaaagacaattaaaaataacaatacaataaaatgcacatgaactatggttatttaactcttcttgagagaggatctcactctgtcacccaggctggaattt[132 bp omitted]gtattctaaatagagatggggtttcaccatgttagccaggatagtctcgatgtcgtgacctcatgatctgcccgcctcggcctcccaaagtgttgggattacaggcgtgagccaccgcacccagccagcaagtgcatttagaactactctactttctaccccataacttttttttttgtttgtttgagacaagtctcactctgtcacccaggatggagtgcagcagcacaatctcagcttattgcaactcccgccccctgggttcaagtgtttctcctgcatcagcctcttgaatagctaggattatacaggcacctgccactgtgcctggctaaattttgtattttaatagagatggggtttcactatgttggccaggctggtcttgaactcctgaccacgtgatcaacccgcctcagcctcccaatgtgctggaattacaggtgtgagccgccatgcccagctacacttttttttgaaacggggtctcgttttcttgctcaggctggagtacaatggggcaatcacagctcactgcagccttgacctcccagacttgagcaatcctaccactatggcctcccaccacacctcgctcattcttgtatatatatatatttttgtagagatagggtttcaccatgttgcccaggctggtctcgaacttctgtgggctcaaccgatcctcctgccttggcttcccacagtcctgggatcagaaacatgagccacagtgcctggccagtgcagctttatttacagtaaccaagatatagagtcagtctaagtgaccatcagtggatgaataaaaaatgtgcccgttgggtaccctgcctactgcctgggttatgagattgttgggaccccaagccttaaaaaggaaacatggtaggccgggcacagtggctcacgcctgtaatcacagcactttgggaggccaaggcgggtggatcacttgaggccaggagtttgagaccagtcaggccaatgtggtgaaaccctgtctctactaaaaatataaaaaaatcagccgggcgtggtggcacactcctgtagtcccagctacttgggaggctgaggcaggaggattgcttgaaccagagagtcagaggttgcagtgagccaagatcgtgccactgcgctccagcctgggtgacagcaagactccatctcaaaaaaaaaaaacaaacaaacatggtattaattacacaatggaatactcctcaaccttaaggaactcctatctttttatttaaaaattgccagttttatttcagctagagatcactttttagcataatgtttcctgtctttaacaatgggtgagggtttttttttttttttttttggtttggtttggattttggttttgcttttgagtcgaagtttcactcttgtctcccaggctagagtgcaatggcgcgatctcggctcactgtgacctcctcctcccaggtttaagtgattctcctgcctcagcctccagagtagctgggattacaggcgcctaccaccatgcccgctaatttttgtattttagtagagacagggttttaccatgttgaccagactggtctcgaactcccgacctcaggtgatctgcccacctcagcctcccagagtgctgggattacaggtgtgagcaaccatgcccggccaagggtttttaactttagctgacctccggaggttacaagtttgaaaacggcaggaggaaacccagagagttgtaaacttacgaaggtctgggctctgaaaaagatacaaattttctttccatgccaatagcgctcacacagacatggtgaatgttcctgaaacccgccggactttctgtaagaagtgtggcaagcaccacccccacaaagtgacacaaggcaaggattcttggtatgcccaggggaagtagtgttatgacaggaagcagagtggctatggtgggcagactaagccgattttccggaaaaaggctaaaactacaaagaagattgtgctaaggcttgagtgccttgagcccaactgcagatctaagaatgctggctattaaaagatacaagcagccaagcgcggtggctcacgcctgtaatcccaacactttgggaggccgaggtgggcggatcacaaggtcaggagtctgagaccagcctggccaaaatggtgaaaccccatctctactaaaaatacaaaacttagctgggcatggtggtgtatgcctatagtcccagctactcaggaagctgaggcaggagaatcgcttgaacctgggaggcagaggttgcagtgagccaagattgtgccactccagcctgggcaacagagtgacactctgtctcaaaaaaaaaagatgcaagcattttgaactggaaggagataagagaaaggaacaagtgatccagttctaagtgtcatcttttcttttatgaaggcaataaaatcttgagcttatggtaaaatgcaaaattttccccccttctcctttttcagaagcagctttgaaatcctttaataaaaggaagcctctatcattaggtaagttacctcatttataacttttattcttcatgtgagatctggggactcgggcctttgttttaaggagaatgtgctgagcactaagaatgcaaagaaatgccggacttagcatccctgctcccagggcggagctggtctcgcaggtgcgtagcagtaagacctgggaagctgaaacacgatcgcgtttgttggaaatctataaatacatacaaagcggggaagggtaagcttggcctttgaatctggataaggtagagacttttcttttttgagatggaggcttgctctgtcacctaggctgaagtgcagtggtacgacctcggctgactgcaacctctacctcctgggttcaagcagttctcctgcctcagcctctagaatagctgggattacaggtacctgccaccaggcccggctaattttttgtggtgtttgtagagatggggtttcaccatgatggccaggctggtcttgaactcctgacctcaagtgatctgcccacctcagcgtcccaaaatgctgggattatgggcatgagccaccaccacacccggttttgtttttttttttttttttttttttttttttttttttttgaaacagggcttcactctgtcacttaggctggagtggtgcaatcatggttcactgcagccttgacctcccaagctctggtgatcctcctgcctcagcctcctgagtagctgggaccacaggcacttgccaccatgcctggctaatttttttcactttttgtagagacagggtcttgctatgttgcccaggctggcctcgaattactaaactcaatcagtcctcctgcctcaccctcccaaactgctggggtacaggtgtgagccatgacacctggcccttaccagctacttatatcctgaagattattattattttttttttttttgagatagagtctctctctgttgcccaggctggagtgcagtggcgtgatctcggctcactgcaagctccgcctcccgggttcatgccattctcctgcctcagcctcccgagtagctgggactacaggcgcccaccaccacgcctggctaatttttttgtgtttttagtagagacggg[148 bp omitted]cggcttgattgcagtggcacagtcatagctcattgcagcctcaaccttccaggctccagagatcctcttacctcagcctcctgagtagctgggactacaggtgtgcactgccacacctgactaatatttgtatttttggtagggacagtttcactatgttgccagatatggtgtcaaactcctggtctcaagtgatcctcccaccttggcctcccaaagtgctgggattacagacatgattcaccacacctggccatgaagactttttttttttggacaaagtctcactctgttgcccaggatggaatgcagtggcatgatctcagctcactgcaacctctgacctccgcctcccggttcaagtgattctcttgcctcagcctcccgagtagctgggattataggtgtctgccaccaagcccagctaatttttgtaattttagtagagatggggtttcaccatgttggccaggctggtcttgaactcctgacctcgtgatccacgtgcctcagcctcccaaagtgttgggattacaggtgtgagtcactgcgcctggtctcatgaagaccttttttgagacagagtcttgctctgtcacccaggctggagtgcagtggtacaatctcactgcagcctccgcctcccaggttcaagtgattctcctgccttagcctcccaagtagctgggattacaggcgcctaccaccacgtctggctaatttttgtatttttagtagagacagggtttcaccatgttggccaggctggtctcaaactgctgacctcaaatgaactgtctgcctcagcctcacaaagtactgggattacaggcatgagccacctcacctggtggtgaagactctaaaggctcttctcagatcagcctttgtcctgaatttcacatgcccgtgtccagttccctccccagcatcttttcaggagttccatggactcacctcttcattatccagggttaagctgcagatattgttattaggattccaccttgttctctctctttttttttttttttttgatacggagtctcgcttgctcttttgccaggctgaagtgcagtggagcgatcttggctcactgcaatctccgcctcctgggttcaagcaattcccttgcctcagcctcgcaagtagctgggacttacaggtaacacaccaccatgcccggctaattttttgttttagtagagacggggcttcaccatgttggccgggatggtctcgatctcctgacctcatgatccgcctgccttggcctcccaaagtgttgggttacaggcatgagccaccatgcccggctgattccaccttgttcttacattctttcccagttcattttaaatttatctacctcatcagaaactagggggttaggcctggcaggcagatcacctgaggttgggagttcgagaccagcctgaccaacgtagagaaaccctgtctgtactaaaaatacaaaattagccaggtatggtggcacattcctgtaatcccagctactccggaggccgaggcaggagaatcacttgaacccaggaggcggaggttgcagtgagccgacatcacaccattgcattccagcctgggcaacaagagcaaaactacatctcaaaaaaaaagaaaaactaggcagttaatcctcaaagcctttccagtggccttatgcgtgagtagtttgtgtgtgtgtgtgtgtgtgtgtgtgtgtgtgtgtgtctttcacaccatgtgttctgaactacttaggaattctcaccagaaaggcacataaacctgggatcatggcctaatgtactttcacttttacatccagtaccttatcaacgtcctttttagtacctaatctaggcttcactactgagactcaggggtccaacttgagccatcttggagtcccactgccagcacagcaacaggcctgtaatgccgccctttttctccagggataacacggaaagaacgaccacctctagacgtggacgaaatgctggagcgcttcaaaacagaagcacaaggtgggtgtcaggacctccaatgttggagtcagctgaggaagccccccgttcttgctgctatctcctgttcctttgaagaaccccatctctctccaatcttttcctccactattcttaatgtgcccactgtctcctggagaatgccaacctcccttccgtaagaatagagggaagaacgaacgttgcagagaattagaactcagtttgtagaaagttaggagcacagcgcagagagtttttgtttttgtttttgttttgagacagtttctctgttggccaggttggaatgcaatggcgcgatctcggctcactgtaacctccacctcccaggttcaagcgattctcctgattctcctgactcagcctcctgagtagctgggattataggcacctgccaccacacccagctaatttttttttttttttttgagacgaagtcttgttcttgtcacccaggctggagtatagtggcaccatccctgttcactgcaacctccgcctcccagattcaagtgattgtcctgtctcagcctcctgagtagctgggactacaggtgcatgccaccacgcccagctaatttttttttgtacttttagtagagacaggtttcaccatctcattcagggtggtctcaaactcctgacctcaagagatctgctccacccacccccaagtctcccgaagtgctgggattacaggcgagagccaccgtacccggccttctttaaattatttaaaagttgacaggtggccaggtgtggtggctctcacctataatctcccagcactttgggaggctgaggcgggtggatcaagagatcgagaccatcctggccaacatggtgaaacccaactctactaaaaacacaaaaattagccgggtgtggtggcacccgcctgtagtcccagctactcaggaggctgaggcaggagaatcgcttgaacccgggaggtggaggttgcagtgagccaagattgtgccactgcactccagcctggcaacagtgcgagactccatcttaaaaaaaaaaaaaaaaaattgacaggcataaatgtatttatggtacattgctcagacaactttaatataaacaacttacagagaaaattgagtcttttgggtaggtgacttgcctgagctgactttgtgataggttttttctgttttttttgtttttgaaatagagtctcactctgtcatgcaggctggagtgcagtggccccatcttggctcactgcaatctctgcctcctgggttcaaggggtcttcctgccacagcctccccaggtgctgggactataggtgcccaccactatgcctggctaacttttgtgtttttagtacagatggggtttcaacagggtagccaggttggtctagaactcctgacctcaagtgatccacctacctcggtctcctaaagtgctgggattacagctgtgaaccaccgcacctagcctgtgatcagtttcagatcagccttgcttactccacattccctcttatcttcctggtagcatttttgttttttcttgagaaagagttttgcccttgtcgcccaggctagagtgcaatggtgtgatctcggctcgccacaacctccacctcccaggttcaagtgattctgcctcagcctcccgagtagctgggatcataggcgcccaccaccacatctggctaatttttgcatttgttagttttatttttagtagacagggtttcaccatgttgggcaggctggtcttgaactcctgacctcaggtgatccacccacttcggcctcccaaagtgctgggattacaggcatgagccaccgtacctagcccacattgacttttgatacagcaagtatttcttgctatggctctgtataatagaggtgagtaacttggttgaaggaattgtttgccctgttcatctctctagacacggccaatgtcattcctggcacacaatctttttttttcttgagatggagtctcactctgttgcccagactggagtgcagtggtgcaatcttggcccactgcaacctctgctacccaggttcaagcgattctcctgcctcagcctcccaaatagctgggagtacaggtgtgtgccaccacgcccagctaattttttgtattttagtagagacagggtttcaccgtgttagtcaggatggtctggatctcctaacctcgtgatccgtccgcctcagcctcccaaagtgctgggatgacaggcgtgagccactgtgcccagcctagcacacaatcttgacaaagaatttcggtgcgacttggggtactgtggtgcctgctctatcatcatgcttcagcaggaaatgtgggtgaatagtgcctggtggcatggcaggtaaagaaatgttttgttttgtttttttttttgagacagtcttgctctgtcacccaagctggagtgcagtggcgcaatctcggctcactgcaagctccatctcccgggttcacgccattctgcctcagcctccccagtagctgggactacaggcgcccgccacacgcccggctaattttttgtatttgtagtagagacagggtttcacc[140 bp omitted]gcagatttattggagaaagtaggaaaagacattggcagagagaccccagcgggcaggttgtcatgagtagctcactgccaggagaccaaagcttcctgcagattttatagaatagggcttgggctgattgataatgtcaacagggggtttaacttgcggtcttctttcagcagaagtgtttgataaactgaggcgtttcatggcaaacagggagtttgtgagctctgtgtgtgatctggccaggaaggccaaacatcttgggccgtatctcctggaccataaaagcagacctggcccagtgcagtggttcatgcctgcaatcccagcactttgggaggctgaggtgggtggatcatctgaggtcagcagttttagactggcctggccaacatggcgaaaccccatctctactaaaaatacaaaaattagcctagacgcagtggcacatgcctgtaattccagttacttgggaagctgaggcaggagaatcgcttgaacccgggaggcggaggttgcagtgagctgagattgcgccactgcactccagcctgggcaacagagtgagactgtctcaaacagacctatagctgacctgtttcctcttgtttgtatgccctgaaccatggaggaaagcttatttatttattttattgagatggagtcttgctctgttgcccagggtggagtgcagtagtgcgatctcttactacaacctccatctcccaggttcaagcaattctcgagcctcttggcctcccaagtagctgagattacaggcatgcgccaccacgcctggctaatttttgcatttttagtagagatggggtttctgtgttggccaggctggtctcgaactcctgagctcaagtgatccaccccacctcagcctcccaaagttctgggattataggcatgagccaccacacctggccggaaaacacatttgtagcttatttgctttatctgatcccgtgccccccctcccccccgccccatcagcctgcctccttttctctaattgggactccacaggaaatacacctgattttgtgtcaatctcacatgagtttgtattttgtagcgtttacagaaacgaaaggaaatgtcatctgcctgggtaaagaagtctttaaaggaaaaaagccaggtctgtaccatatcttcctgcagggagcttgggatcagatttctctttataaacttgaagtcctcttaactttcctatgtaacacaaagcatttatttatgtatgtatgtatcgagacggagttttgctcttgttgcccaggctggagtgccgtggcgtgatctcgactcactgcaacctccgcctcccaggttcaagcaattctcctgcctcagcctcccgagtagctgggattacaggcatgcgccaccatgactggctaattttttatttttagtagagacaaggtttcttcatgttggtcaggctggtgttgaactcccaatgtcaggtgatctgcctgcctcgacctcccaaagggctgggattacaggcatgagccactgtgcccggccaacacaaggcattttgttattttggttttccctatgggtaactgattgcatcctctctcccttccctcctcaccaatgataaagacaaagacaataggtgcaggtatatattgaagacgaagttccgggagatgtggaagagctggcctggagatagcaaagaggtccaggttatggctgagagatacaagatgctgatcccattcagcaaccccagggtgcttcccgggcccttctcatacacggtggtgctgtatggtcctgcaggccttgggaaaaccacgctggcccagaaactaatgctagactgggcagaggacaacctcatccacaaattcaaatatgcgttctacctcagctgcagggagctcagccgcctgggcccgtgcagttttgcagagctggtcttcagggactggcctgaattgcaggatgacattccacacatcctagcccaagcacggaaaatcttgttcgtgattgacggctttgatgagctgggagccgcacctggggcgctgatcgaggacatctgcggggactgggagaagaagaagccggtgcccgtcctcctggggagtttgctgaacagggtgatgttacccaaggccgccctgctggtcaccacgcggcccagggccctgagggacctccggatcctggcggaggagccgatctacataagggtggagggcttcctggaggaggacaggagggcctatttcctgagacactttggagacgaggaccaagccatgcgtgcctttgagctaatgaggagcaacgcggccctgttccagctgggctcggcccccgcggtgtgctggatcgtgtgcacgactctgaagctgcagatggagaagggggaggacccggtccccacctgcctcacccgcacggggctgttcctgcgtttcctctgcagccggttcccgcagggcgcacagctgcggggcgcgctgcggacgctgagcctcctggccgcgcagggcctgtgggcgcagacgtccgtgcttcaccgagaggatctggaaaggctcggggtgcaggagtccgacctccgtctgttcctggacggagacatcctccgccaggacagagtctccaaaggctgctactccttcatccacctcagcttccagcagtttctcactgccctgttctacaccctggagaaggaggaggaagaggatagggacggccacacctgggacattggggacgtacagaagctgctttccggagtagaaagactcaggaaccccgacctgatccaagcaggctactactcctttggcctcgctaacgagaagagagccaaggagttggaggccacttttggctgccggatgtcaccggacatcaaacaggaattgctgcgatgcgacataagttgtaagggtggacattcaacggtgacagacctgcaggagctcctcggctgtctgtacgagtctcaggaggaggagctggtgaaggaggtgatggctcagttcaaagaaatatccctgcacttaaatgcagtagacgttgtgccatcttcattctgcgtcaagcactgtcgaaacctgcagaaaatgtcactgcaggtaataaaggagaatctcccggagaatgtcactgcgtctgaatcagacgccgaggttgagaggtgagaaccgtttcactctaccagtcgttccatctttagcctcatcccatgcccccttaggaagaggccagagcctcctatgcactgtggcttagggtcaggaattccctcttgttggactctttgtttgtttttgttttgagatggagtcttgctctgtcgctcaggctggagcgcagtggcgcgatcttggctccctgcaacctccgcctcccgggttcaagtgattcttctgcctcagcctcctgagtagctgggactacaggcgcctgccaccttgcccggctaatttttatattttcattagagacgggatctcagcatgttggccagtctggtcttgaactccgcctgacctcaggtgatccacctgcctcagcctccaaagtgggattacaggcatgattcaccatgcccggcccaaatatatttttttaagacagggtcttgctgtgttgctcaggctggagtacagtggtgaaatcagctcactgcatcctcaaacttctgggttcaagtgatgttcctgagtacctgggatgacaggtattaagtgtgcaccatcatgtccagctaacttaagtgggggtttttttttgtgtttttttttttttttttttttttggaaagacaaaatctcactatgttgtccaggctggtcttgaactcccaaagcactgagattacaggcatgagttaccacacgccctgcctgaatatttcttattgatatgtatagatatgtatattcccaatctttttttttttttttgagacggagtttcactctttttcccaggtcggagtgaagtggctcgatctcggctcactgcaacctccgccccaccaggttcaatgattctcctgcctcagcctcatgagtagctgggattacagccacccacgaccatgcccagctaatttttgtacttttagtagagacggggtttcaccatgttggccaggcaggtctcgaactcccgacctcaggtgatccacccgcctcagcctcacaaagtgctaggattataggcgtgagtcaccgtgcccggtctatattctctatcttttatcaatgatgtgcttagcattttaacttatttttaccctctattggatttttgtctaagaagaataggttctttctcctgtgatgcttcttgggtgttgagttgtctgatggtggtgctaataagtgattacatggtccagctttcaattgtactcatttgtcaggggtatatgcccagagaaaccctaaatacttcagccgtgatggacacacatttggtgtaaccctttcttctcttccctatagatcccaggatgatcagcacatgcttcctttctggacggacctttgttccatatttggatcaaataaggatctgatgggtctagcaatcaatgatagctttctcagtgcctccctagtaaggatcctgtgtgaacaaatagcctctgacacctgtcatctccagagagtggtgtaagtagaaactaattcatgaactcaaatccttagggtatgaaaatggtacaatgttaacatcggagcaatattcagattcctgtactagactcttaagtgctcgagacacagggaattgagagagtcctgtccttaaatttattttgtgggataatcgtataaagtaatttctaggggctgggcatggtggttcacacttgtaattccaacacttcgggaggccgaggcagacagatcacttgaggtcaggagttcgagaccagcctggccaacgtgacaaaaccctgcctctactaaaaatacaaaaattatccaggcgtggtggcaggcacctgtaatatcagctacttgggaggctgaggcaggagaattacttgaacccaggaggcggaggttgcagtgaaccaagatcctgccactggactccagtctgagtgacagagcgagactgcgtctcaaaaaaaaaaaaaaaaaaaaagaaaaagaaaaaaagggccgggcacaatggctcacgcctgtagtcccagcactttgggggcccaaggtggggggatcacttgaggtcaggagttcaagaccagcctggccaagatggtgcaagaccctgtctctacgaaaaatacaaaaatttgccaggtgtcgtggcaggtgcctataatcccagctactccggatgctgagggtaggagtcgcttgaatccgggaggcagagtttgctttgcagtgagccgagatcgcgccactgcactccagcctgggcaacagagtgagactccatctcaaagaaaaaaaaaatctgtaaagatggacaaaaatttaaacatggaaaaaatagttcctaaagtttaaatatatcgagcccctggtttccatttaagtacgatacaggtgtacacactaaagatttcactttcgttctcttttccctaggttcaaaaacatttccccagctgatgctcatcggaacctctgcctagctcttcgaggtcacaagactgtaacgtatctgacccttcaaggcaatgaccaggatgatatgtttcccgcattgtgtgaggtcttgagacatccagaatgtaacctgcgatatctcgggtatatctcttaatcattaaaatccttcatcatacaaacataagctaccacaagcttatgtggcaattttgtgtaaataagaaaaagttcgttattctgactagaaacagtactaagggcagatgacccaggatgcagcatgggctgaacttgagtttctacttgccttgaacagtaaacaccctggacaaccatacgtgaggaccctgaatccaaagaaactcccagaatctttatcatctttttttttttttttatgaagtcttgctctgttgcccaggccaaagtgcaatggcacgatcttggctcactgcaacctctgtctcctgggttcaagtaattctgctgcctcagcctcccaagttgctgggattacaggcacccgccaccacgcccggctaatttttgtgcatttagtggagctggtttcgccacattgccaggctggtctcgaactcatgacctcaggtgacctgccctcctcaggctcccaaagtgctgggattataggcatgagccaccatgcccagccagagtccttatgttttggttttggttttggttttttctttttcttttttctttttgagatggagtctcgctctgtcacccaggctggagtgcgttggtatgatctcaggtcactgcagcctccacctcccaggttcaagtgattctcctgcctcagcctcctgagtagctgggattacaggtgcacaccaccacacctggttaatttttgtattattagtagagatggagttttaccacattggccaggctggtctcgaactcatgacctcaggtgatctacccccccacccccaccccaccccgccgtcggcctcccaaagtgaggcatgagccaccgtgcccagcccagaatctttatcttctatcagagatcattcactcatggttcatgcttctcctgtatgatgattcagaataccagctattgacatttttcaagcaagaacccttcaggaacatcaagttgccccttttctgttagtcctctggtttgagagctctccccttgggaagctgtccagtggctgcccaggcgatgagaacctacatgcatcatggggttccatgaagcctcacttggccacactggtgtagtaggtggtcattggcctcaaattattgccctgggccaggcgcagtggctcacgcctgggaggccgaggtgggtggatcacttgaggtcaggagttcaagaccggcctggtcaacatggtgaaactctgtctctactaataatacaaaaattagctgggcatgttggcgcacgcctgtagtcccagctactcaggaggctgaggcaggagcatcatttgaacctgagaggcggaggttgcagtgagctgagatcacaccaccgcactccagtctgggcaacagtgtgagactgtctcaaaaaaaaaaaaaaaaatcttggctgggtgcggtagctcatgcctgtaatcccagcactttgggaggccaaggcaggtggatcacaaggtcaggagttcaagaccagcctggccaacatggtgaaaccccacgtctactaaaaatacaaaaacattagctgggcatggtggcgcgtgcctgtaatcccagctactcatggaggctgatgcaagagaattgcttgaacctaggaggcagaggtagcagtgagccaagatcacgccattgcactccagcctgggcaacagagcaaaactccatctcgaggacagaaaaaaaattgattgctctggctctactgatacaatcttaggctgcttaatgggatcttagttgaataggatgctgtacatcttacaggtattggaaggttgaatgaaaccaagcccatgcattcaatagtggctgctatcattactaaccgttgcaattaccctcttttctttttgcctgagaataatgggatgcagggtgagggggaatattgggtgaattaaagatttgggtcactaatttctttctttttttctcaagatatagtcttgctctgtctcctaggctggagtgcagtgccacaatcttggttcactgcaacctctgcctcccgggttcaagtgattcttctccgtcaacctcccaagtagctgggattacaggcacccacctgtatttttgtatttctagtattttgtatttctagtagagacagggttacgccatgctggtggccagggtggtctcaaactcctgacctcgggcaatccaccacacccagctaatttttggtatatttagtagagccggggtttcaccgtgttggctgggctggtctcgaactcctgacctcaagtgacatccatcttccaaaatgctgggattacagccatgtgccaccacgcccagctaattcttgtatttttaggagaaatggggtttcatcatgttgttccggctggtcttaaactcctggcctcatgatccacctgccttggcctgccaaagtcctgggattacaggcatgagccactgtgcccagccactcatttcttatgaatttattctaacacattttccggatgaacagggcaccttgaaacataggttagtgggctgggtatggtggctcctgcctgtaatcccagtactttgggaggcctaggctggtgtatcgcttgaagtcaggagttttttgttttgagacggagtcttgctctgtcgcccaggctagagtgcagtggagtgatctcggcttactgcaacctccgcctcctgggttcaagtgattctcttgcctcagcctcctgagtagctgggactacaggcacgtgtcgccacgcccatctaacttttgtatgtttagtagagccggggttt[132 bp omitted]catggtaaaaccccatctctactaaaaaatacaaaaattagccaggcaagatggcatttgcctgtaatcccagctactcaggaggctgaggcgggagaatctcttgaatctgggaggcagaggttgctgtgagctgagatcgcgccactacactccagccagggcgacagagcataaataactccctttcaaaaaaccaaacaatgaaacataggttagcggagtctgcatccaacattagagtcagattgactaagttctgtatttccagctgattcctgggcgatgttggtgccactggtctgaccaccctttgacaactgctgctccagataattcaagtcggggtataacacaaccagtgagatgtaaaccaaagacgattccacggttagattctcaagaatgacttgttctgccgggcgcggtggctcacgcctgtcatcccagcactctgggaggccgaggtgggcagatcacctgagattgggagtttgagaccagcctgaccaacatggagagacccccacctctactgaaaatacaaaattagctgggcatgttggtgcatggtgcatgcctgcagtcccagctactcgggaggctgaggcaggagaatcacttgaacccaggaggcggaggttgctgtgagccgagattgcgccacctgggcaacaagagtgagactcagtctcaaaaaaaaaaaaaaaatgacgtggtcctatttctcccacaggttggtgtcttgttccgctaccactcagcagtgggctgatctctccttggcccttgaagtcaaccagtccctgacgtgcgtaaacctctccgacaatgagcttctggatgagggtgctaagttgctgtacacaactttgagacaccccaagtgctttctgcagaggttgtcgtaagtctctcctctcttacagagcagctgtgctttcgatctggggccacagacgagcaatggtcatgcctgacttggctgtatggaacctctcgctgatgtgaacacctgttcccatgtttagatccaggccgatggcctgtgaattttgttcttctctcattcctattccttcataggatcaccagtgcatgatagaaggtggggagttcacaagaaggggcttttggatgctggcacttgtggagctagccgggaaggttgaagttggacctgtcaaccgtgttgccatttgtgattcttttgtaggttggaaaactgtcaccttacagaagccaattgcaaggaccttgctgctgtgttggttgtcagccgggagctgacacacctgtgcttggccaagaaccccattgggaatacaggggtgaagtttctgtgtgagggcttgaggtaccccgagtgtaaactgcagaccttggtgtaagtccgtgctggctgcctgtgtgcgtgggtgtatatgcacacgccccccacctccgggtttgagtagggtggttatgagaacacttaattcctctaaaagttccaagcatgatgctaatgacaactggtaagacctgggtagatgatggtaggaaaaaagtataagtagtagtagagtagtagtaatattctatagggatttggggaatgtagctggttttcgggttttttttttcctctttatgtatgtatgtattttagagatgggatctcgccgtgttgcctaggctggtctcaaactcctgagctcaagagatctgcctgccttggcctcccaaagtgctagaattacaggcatgagccatgtcaccccatgctgtgttttctcttaatctgtgttcttagaactataactgtaacataaattgcatgcaattggttgtaaatggaattcatttacttattttttaatgaatgatttgcaaatcaggtagtcttctgggccagtgtacgctcagactcccaatggaagctattggaagctacatgctcaatgtgatcctccttttaatactaaaatcacaggacacgtggcctggcatagtggctcacgcctataatcccatcaccttgggaggccgaagcaaggcagatcccttgagggcaggagttcaagaccagcctgcccaacatggtgaaacattgtctctctactaaaaatacaaaaattagtcacgcatggtgggacatgcctgtaatcccagttactcaggaggctaaggcaggagaatcacttgaacttcggaggtggaggttgcagtgagctgagatggcaccactgaagtccagtctggccaatagagcaagactctctcaaaaaaaaaaaattataggacaaatctttagaaaggaattggggcctggcatggtggctcatgcctgtaatctcagcactttaggaggcgggcagaacacctgaggtcaggagtttgagaccagcctggctgatgcagtgaaaccctgtctctactaaaaatacaaaaattagctaggcgtggtggtatggtcctgtaatcccagctacttgggaggctgaggcaggagaatcgcttgaagtcgggaggttgcagtgagccgagatcgtgccagcctgggtgacagaacgagattgtctcaaaaaaaaaaaaaaattgtatctgcactgatggtttctgttcagagattcgattttatgttaacatctctggtattttttttttttttttttaagatggagttttactcttgcccacgctggcaatggcatgatctaggctcactgcaacctccggcttcaaggaggttgattctcctgcctcagcctcctgagtagctgggattacaggcactcaccaccacgccgggctaatttttatatttttagtagagatgggatttcaccatgttggccaggttggtctcgaactgacctcatgatccgcccgcctcagccttccaaagtgctaggatttacaggcatgagccactgcgtccagccatacatatctctggtattctttgtctctaacatcacctccaacagttaggaactgtcctcttcctatgaagtaactaatctaggatatgtacctggcatctgaaaactacccacttaaatttaatgacatattcagttcatggctggagacgatgagtagaaggaaaggattcttcccacacccactatatctaggccctgaaacattaaaaaagaagtcccacaagcagtgagatgtcaccgactcactaactgtatcttcaaatgaatgtctagtttttttggttgtgtgtgtgtgtggtgtgtggtgtgtgtggtatttttttgggggggggggggttttcttttttttttttttttggttttttttttttgatagtcttgctctgtcgcccaggctggaatgcagtggctccatctcagctcactgcaacctccacctcctgagttcaggtgtgattctcctgcctcagcctcccagggattaaggtgcatgccaccacgcccagctaacttctttatttttagtagagacgagttttcaccatgttggtcaagctggtctcgaattcctgacctcaggtgatccacccacctcagcctcccaaagtgctgggattacaggtgtgagccaccgtgccggccccctcaattcaactttttgatccatgcccctattttgctaagttgtcaacttccctttagtcttatgtgggttttcctccattacagtcatggaagtttctagaaggccgggtagggtctttgagaggccgaggcaggtggatcatgaggtcaggagttcaagaccagcctggccaacatggtgaaaccctgtctttactaaaaatacaaaaattagccaggcgtggtgtcggagcctgtaatcccagcttacttgggagggtgaggcagagaattgcttgaacctgggaggcggaagttgcagtgagctgagattgtgccactgtactccagcctgggtgtcagagcgagactgtctcaaaaaaaaaaaaaaaaaagtttctatacattcataaagtttcaagatttgggggtgtgttttcacttctccatcgtcatggactccaatctgccatctatttccaaggcccttccaggtcctgtgtccctcagctagtggtatgcttcacttgggacccagagatacatgggcattatagttcaaattataattaagtttagaactctattgagacagaagaaagaaaacagagctaaggtgaaatatctctgataatctgtgttggttaatatctaggatcctagtaccagatatgttggagtgtgagctggtgtcttctgcctgtaagacactacctctctagcaactgaatttagcaaatacaatcgtaatcccagcatgttagggaggccagggtgggcagatcatctgaggtcgggagttcaagaccagcctggccaacatggggaaaccctgtctctactaaaaatacaaaacttagctgggtgtggtggcacgcgcatgtgtgtacacacacacacccccctgtaatcccagctactcggaaggctggggcacaagaatcgcgtgaaaccaggaggcggaggttgaagtgagccaccgtgccagctgagaatcctttttacttctccaacttctgttggccacctgcattccttggcttgtggcccttcctccaacttcggcagagcatcttcaaacgttgccctggctcccttatcacgtcacctcctgctggctttgactctcagctccctcttatgaggatccctgtgattgctggacctacccaaataaaccaggatataaaccatcttaagatgctcagtcacctctacgaggtcccttttgctcgcaggtgccaggagttgggacttggacatctttaggggaggccattcttctgtccaccacaccaccccatgattccatttccatgtcaccactgtctctaagtgtgtctaacccacggctcaagagtcaaaggtgcatcacagcagtgagaactcacaggttcgggtttgctttcttcctgtggttgatttctaggctttggaactgcgacataactagcgatggctgctgcgatctcacaaagcttctccaagaaaaatcaagcctgttgtgtttggatctggggctgaatcacataggagttaagggaatgaagttcctgtgtgaggctttgaggaaaccactgtgcaacttgagatgtctgtggtgagttaacttataagttcaacttcctatacttacaccttactgaatctgtggctagtgtaaaataatcagtgaagccgacttcccaagttatataattgagaggacctttatagagtcgatcgagcatttactaggatggttaaaggaataagttctagtctatgtctaagtttttgtttttttttttcttgaagttttgctcttgtcacataggctggagtgcagtggcgtgatcttggctcactgcaacctccgcctcccaggttcaagcaattctcttgcttcagcttcccgagtagctgggattacaggcgcccgccaccatgcccagctaattcttgtatttttagtagagacagggtttc[140 bp omitted]tgtgaaattttaaggatacagtgcctcaagccattcagccaaaagccactgcccagcaccccacattcagagaggtgggaattgggccaggcacagtggctcatacctgtaatcccagcacttcgggaggccgaagcgggcggatcacttaaggtcaggagctcaagaccagcctggccaacttgaaactccatctctactaaaatataaaaattagccgagcatagtagtgggtgcctcttttttttttttttttttttttgagatagtttcactcttgttgcccaggctgtagtgtaatggcgcgatctcagctcactgcaacctccacctcctgggttcaagtgattctcctgccttagcctcccacatagctgcaaataaacaggcatgtgccaccatgcctggctaattttgtatttttagtatagacggggtttctccatgttggtcaggctggtctcgacctccggacctcaggtgagagccaccgtgcccagccagtaggtgcctttaatcccagctacttgggaggctgaggcaggagaatcacttgaaccctggaggcagaggttgcagtgagctgagatcctgtcactacactccatcctgggctacaagagcaagactccatctcaggaaaaaataaaaaagaggtaggaattagatatcgtgccagaaaatgctggctctatcagcaggtgagtggtctcaacttggctatcttacaaataccttgtgagttagctacaatcagatgcacttgaacctggaatcctatctgggaggcaatcttaaaagaatttgactcgggatgggcaaggtggctcatgcctgtaatcctggcattttgggagtccaaggcaggtagattgcttgaggccaagaatttaaaaacagcctggccaacacaatgaagccctgtctctactgaaagtacaaaaatccgctgagcatggctgtgtacctctgctcccagttactcaggaggctgaggtgggaggatcacttgagcctgggaggaagaagttacagcgaattgagatcacgtcacctcactccagcctgggtgacagtgagatcctgtctcaaaaaaaaaaaaaaaacaaaaaaaacaaaggcgcctttttaatcactcactgacacgtgtagaggagcaaaaagtttgagttgctggttggcccaggaggtcaaggctgcagtgagccaagatggcgttaccacactccagcctgggcaaccgagtgagaccgtgtttcaaaaaataaagtggcagggtgcagtggctcatgcctgtaattccagcactttgggaggccgaggcaggtggatcacctaaggtcaggagttcgtagaccagcctgtctctactaaagagacaggtgaaaccctgtctctctaaaaccacaaaaatcaggcaggcatggtggcacatagctataatctcatctacttggaggcacgagaactgcttgaatccaggaggcagaggctacagtgagccgagatcatgccacagcactccagccctggcgagagagcaagactgtctcaaagaataacttcaaagatggaagttatttaacctctctgctcaaaagcctcagtgcttccctatgtcaatccaggtaaaatcctatattgacgatggcttcagggtcttctgtgagctggccactgcttacctatgacctcatcttgacaatcctccctgtctcactcatgcccgctgcctggatgttctattttacgtgtcagtcacatgtatcttcagggcctctgcacaagctatttctctgcctggagaactcccccccgagctctatgactcggtctcttcaccccctcacctccaaccattgtagccagaacccccagttattccctgtaccccttgcccttcagaacccctcatcgcctccatattttcctgttagcagatgagccctgagggcggagacgttttgtttgttttttgagaccggagtctcactctgtcacccaggctggagtgcaatggcgcgatctcggctcactgcaacctccgcctcctgggttcaagcgattctcctgccccagcctcctgagtagctgggattacaggtgcctgtcaccacgcccagctaacttctgtatatttagtagagacacggtt[136 bp omitted]acgagggtgggcttggcttgccggagggcatcgatcagcactggctgcattaacgtgttgatttctgtgtttccccaggttgtggggatgttccatccctccgttcagttgtgaagacctctgctctgccctcagctgcaaccagagcctcgtcactctggacctgggtcagaatcccttggggtctagtggagtgaagatgctgtttgaaaccttgacatgttccagtggcaccctccggacactcaggtatgatccatttacttccccatcaggctttctccagagtggtaggtttaggggaagcataatgacatggacctgctgtaggagactgatctggtagctggattacaggttcccgccatcacacccagccaatttctgtatttcacttggagaaacggggt[142 bp omitted]ctatgttccccaggctggagtccagcagcacaatgatggctcgctgcaggctcgctccagctcctgggctcaagcaatcctgcctcagttcctgagtaggtaggtttataagcatgaaccattgcacccagccacggctgccgtctacctgctcatgatagccatttgtcactgggctgtgttttgtttgttgcattttgtcagggttttggggttttgttttgttttttctttctttttttttttttttttctgagatggagtctcactctgttgcccaggctggggtgcagtggttgctaactgcaacctccacctcccaggttccagctattctcatgcttcagcctcccaagtagctgggattacaggcatgcaccaccacacctaggtaatttttgtatttttagtagagacagggttttgccatgttggccagggtggtctcaaactcctgacctccgtgatttgcccacctcagcatcccaaagtgctgggattacaggcatgagccaccgcacccggcctgagttgtattttgataccatggcatcaaagaaccaagaagccccttcctaggaatgtgggaacttcagaaattctcacaagcaatatactctactgctggcttaaaataatctttatgtagaagaaacatagattacttgtttatttaacatgaaactcagcctaagatactttgtaagtcaaaagacatatggacactaagggtttttttaagctttaagtttgtttgtttgtttatttattatttattttggagacagttttactcttttttttggggtgcatcttttttcttttttttttttttttttcctttttttttttttttttttttattgatcattcttgggtgtttctcacagagggggatttggcagggtcataggacaatagtggagggaaggtcagcagataaacaagtgaacaaaggtctctggttttcctaggcagaggaccctgcggccttccgcagcgtttgtgtccctgggtacttgagattagggagtggtgatgactcttaacgagcgtgctgccttcaggatctgtttaacaaagcatatcttgcaccgcccttaatccgtttaactctgagtggacacagcacatgtttcagagagcacggggttgggggtaaggtcacagatcaacaggatcccaaggcagaagaatttttcttagtacagaacaaaatggggggctgacccccccacctccctcccggacagggcggctggccggttagaggggctcctcacttcccattaggggcggccgggcagaggcgcccctcacctcccggacagggcggctggctgggcggggggctgacccccccacctccccgcccggccagagttttactcttgttgtccagcctggagcgcaatggcgctatctcggcttactgcaacctccgcctcccgggttcaagaggttctcctccctcagcctcccaagtagctgggactacaggcatgtgccaccacacctggctaatcttgtatttttaatagagacagggtttctccatattggtcaggctggtctcgaactcctgacttcaggtgacccgcctgcctcagcctcccaaagtgctaagattacaggcgtgagccaccatgcctggcctgcatctcctctgtttaactggtactccggggtccactgagtagaagttgccaaagtgggtgatagagcgggtaagcaggtattagagctatagcccagctgtactcagcaattccattttctgtgtatgataatcaacaagcatctcaaactgcacaatggctatataccattacaaggttaacctgatgttatgtttttctctatcagatcaacatggttgagaataagaggaatgaaaaaaaggattaaaaagagaaatgaaagtctttaatattacattttattatttacttcatttattttttagacaaaaatctcactctattgctcaggctggagtgcaggggcccgatctcagctcactgtaacctccgcctcccaggttcaagtgattctcctgtgtcagcttcctgagtagctgggattatagggatgcaccatcacacccaactaacttttatatttttagtagagatggactttcaccatcttgcctaggctggtctcaaactcctgacctcaagtgatctgcccacctcactctcccaaagtgctggcattacaggcatgacccaccacatctggcctcattttatatttaaaaataaaaaataagcaaatcaagccaggtacagtttaggcaacatggtaaaaccccaactctactaaaaatacaaaaattagctgagcatggtggcaggtgcctgtagtcccagctactcgggaggcagaggataggatggcttgaacccaagaggcacaggttgcagtgagctgagatggtaccactgcactccagcttgggcaacagagagactgtctttttttttttttttttttttttttttttttttttttttgagatcgcccaggctggagtacagtggcacgatctcggctcactgcaagctccgcctcccgggttcacaccattctcctgcctcagcctcctgagtagctgggactacaggcgtccgccaccacgcccggctaattttttgtatttttttagtagagacagggtttcaccgtgttagccaggatggtcttgatctgctgacctcgtgatccacccgcctcagcctcctaaagtgctgggaattacaggcgtgagccatcacgccccacctgagactgtcttttaaaaaaaaaaaaaaaaaatcaatgtggaacactcctttgccacctagaataatcaggaaaggtgacccatgccctgtgcctccttaacagactttcaggtacttgggaatttgaaacaaatctccttgatgcacaaagtaaccttttcttcccccattgtaccccaggttgaaaatcgatgactttaatgatgaactcaataagctgctggaagaaatagaagaaaaaaacccacaactgattattgatactgagaaacatcatccctgggcagaaaggccttcttctcatgacttcatgatctgaatccccccgagtcattcattctccatgaagtcatcgattttccaggtgttggtgaactgcctgtgactcctctcctccccggcccctacccctcagggataatgagttcattgctgggctagatgttttagccatgattctgcctctgttttatacctgcacacatccttatctttgttacatatgaaatatctgtatcacgggtatattgagagaaataaaggtgagagcattcacaaatgaagctgttacttaataatgggctttgacaagttagagaaaagatatcttactgggtagaacctggggggtgggggaagtgacagtgtttaattgcattgatttctattgccttgtcaatctttgccttgccttggtatttcctttcttttttcttttctttttttttttttttttttttagactgagtttcactctgttgcccacgctggagtacactggcacgatctcagcttactacaacctggcaggttcaagcgattctcctgtctcagcctcctgagtagctgggattacaagcatcccccaccacacccggctaaatttttttgtatttttaatagagatgaggtttcaccatgttggccagtctggtctcaaactcctgacctcaagtgatccacccacctcagcctcccagagtgctgggattacaggcatgagccactgtacccggcttttttttttttctttttctttttcctcaagcatgagtgttgctctgttgcccaggctggaatacagcagcatgatgatagctcactgcagcctcaagctcccaggttcaagcgatcctccagcctcagcctcctcagtagctgggactacaggtgcacaccaccaaaccaggccaatttttgtgggattttttttgaagacagggtctcactatgttgcccaggctgatctcaaactcccaggcgcaagtaatattcctgcctcagcctcccaaagtgctaggattacaggtgtgaaccactgtgcctagcctgtcttgttacttgttgacctgcgtggatcactgcctgctgagtattacttgccagaggatttctcctaccaatctacaatattttaggtgcttcggtgtagctcatatatgaccatgtcattgctctgattttgctttttaaaaattctaacttaaaatagaatctcggccaggcacggtggctcacacctgtaatcccagcacttcgggaggctgaggtgggtggatcacgaagtcaggagttggagaccaacctggccaacgtggtgaaaccccgtctctactaaaaatataaaaaattagccaggcatggtggcacatgcctgtaatcccagctacttgggaggctgaggcaggagaattgcttaaacccaggaggtggatgttgcactgtgctgaagactgcactactgcattccagcttgggcaacagagtgactccttctccaaaaaaaaacaaaatctcatggtatgcatagtttttcactatagagtctccattatttccttgtgatacagaattccaaattcaacaaagcagcagtgcaagctctacgctgtaaaaccacaaacaaaacgaactgtactataaagacaacactagttggcaaagttgcttctcatggggagactttgttgctgtctgtgtttactggatgagcaaacaaatggacggtaagggggaaaaagaacagtacaaatttttattaaacactaatcatgtttttttttgtttgttttgagacagtttcttcttgttgcccaggctggagtgcaatggcacgattttggctcactgcaacctccgcctccccgggttcaagcgattctcttgcctcgacctactgagtagctgggattataggcatgtgccaccaagcctggctaattttgaatttttagcagagacggggtttttccatgttggtcaggctggtctcgaactcccgacctcaggtgatccaccagccttggtctcccaaagtgctgggattacaggtataagtcaccgcacctggcaacatttttttcttttttttttttttttttttttttttttttggtggcagaatcttgctctttcacccaggctggaatgcaatggcacgatctcgggtcactgcagcctccacctccccagtttaagcagttctcccatctcagcctcccatgtagctgggaccacaggtgtgcaccactgcacccaggtaatttttgcatttttggtagagatagggttttgccacgttgtccagactggtcttgaactcctgagctcaggtgatctgcccaccttggcctccccaaatgctgggattataggcatgagccaccacacctggtcaaaagtagttttaatatttaaatttaaaactaaaaaagttaatctctcttcctactttcatttcttcatcaggggctattggtttattcccaccgactagatccaagttctctgatactacctttaaaccactccatcactttccagttccactgcatacagtgtgggcttctgaggtttcctggttcaaggtgtccttgttcaatgcggcatgggtcattccctgagcatttttttttttttttgacagtctcgctccattgcccggtttggagtgcagtggtgtgacctcggcttactgcagcctctgcctcccaagttcaagcaattctgcctcaggctcccggataatttttgcatttttagtagagacagggtttcaccgcgctggccaggctggtctcgaacccctaacctcaagcgatctgcctgcctcggtctcccaaagtgctgggattacagacataagctaccgtgcccggcctccagagcatctttattctcagtttcagcgggaagaagggggaaggttggtaaaaagagaggcacaaagtttaaaaaggacattgcgtgaagaaactaaaggtttctccttctccacactattgacatttgggatcggatcactactcgttgggaaacgtcctgtacatttccagggtgttcggcaccatccctagcctctaccccctagataccagctcacatcctcacagttaacagtgatcaaaaatgtctctgggcagtagaaaatatttcctgaaatgcaaagttttcttaggttgagaaccattgtaatctagccccatctttagagaagaaattgagtaacggatctacatccattgaggaactatcgacaccccaggggcccatgaaatgtaaactcgcactcacaattaaccatctttctccaacgtgtgtatttcatgtagccacactctcagatgcccacccccatgacctacaagtcctaaacagggaaacctgtggcacatgggttcatgtgtgtctgaatctatacgttcagagatgaacaagtactgctctccctatacctgtgaccactcgcctccgcccatcactgaattctgaaaatgtggcctcaggctcacagcagcattagcacttgcttgctctggatctcatcacattgatgatcaagaacaaagtattcactgggttctctgctaaggatacaaaaaaaaccattccacaattccacggccatgtttgcacccaggaaccacgagggctgggttagcccagatggtgggcttgggaaatgttcctggagcaaaaaaaagagccagaagtcatgagagcctgaccccctcccccaacgcgcacacacacacaccactctctacctccaagcctcattttcaggcttctcaaagctaaggtcactcccatgagctaagccgcgcttttctcaatcctcagctcttccacaagaataggaagaactctctcctgttcaagatcctgtggctcagctgcagctctggaagaaagaccccggtgagggtcttgcttttcacaatccccaatcccagaccacatcctgtgccccaaaacaacttccatggtaaccacatccttcaggaagtgaagtcaggcaggaagtcaagtcagaagacggaatgggctgggcatggtggatcgcacctgtaatcccagcactttgggaggcagaggcaggtggatcacatgaggtcaggagtttgagaccagcctggccaacatggtgaaaccctgtctctactaaaaataccaaaagtagccaggcttggtggtgcatgcctgtaatcccagctactctggaggctgaggcaggagaatcgcttaaacccggaaggcggaggttgcaatgagccgagatcgcaccattgcactccagcccgggggacagaaaaaaaaatgtagctgagcatggtagtgcacgtctgtgatctcagctacttgggagtctgaggcaggagaatcacttgaacccaggcggtggaggttgcagtgagccaagattgtaatagtccaatgtgttcaccttgcccactgcctagacagagctgattcgtcaagacagggaatcgcaatagagaataattcatgcagagctggctctacgagagaccagagttttattattattcaaatcagtgtctcccagcattcaggaagcgtttttaaggataacttggtgggtgggtgggaagccagtgagccaggagtgctgtttggtcagggatgaaatcgtgggagccaaagctatcttcttgcactcagttcctgagtggaggccaaaagataagatgggccagtttattgatatgggtggtgccagctgatccatcaagtacagggtctgcaagttaaacgctgatcttagaagcagtttagggagggtcacaatcttgtagcctccagctgcatgactcctaagtcataatttctaatctcgtggctaatgttcgtcctacagggccaatctagtccccaggcaacaaagaggtgtgctttggaaaagggctatcatctttgtttaaactataagtttctcccaaagttcagcctatgcccaggaatgaaaaaggacagcttggaggttagaagcaaaatggagtcagttaaatctctttcactgtctcagtcataattttggaaaggtggtttcaagctggcacaactgcactccaccctaggagacagagcgagaccctgtcaaaaaaaaaaaaaaaaaacaagaagtgaagtcaagataggaggtaaattcggaagacaggaagtggtggtagaagacaagaagtgaagtcatacaggaagtaaagtcagaagacaggaagtgaagtaagaagacaggaagtggttgtagaagacaggaagtgaggtcatacaggaagtaaaatcagaagacaggaagtgacgtcaaaccaggatttgcagtcggaggcaggcaagaagtgaaatcagaagacgggaagtggctgaggggaacgtcttttctctctcctgctcagcccgaagtgaacaggtagcatcaggtgtgccatttcagtgactgggcacagcccaggcacccacatctctctgcagcgcctattcttggaacaccagagacctctacactattttctgttgcttttttccttcattttcagagatgagatcctggattgaatgactactatggaaagtgattgaccaaggtaagtcacaactatcttgttctttaattttggtgttgtttgttatgacttgttagccgtctagcactcatagctttgcatttccactctgcattacttgtatttttattattttgtgatattcgtaataatttattataaaactgtgttatttttggatatttttaagttaaaatgcgattttttaactaagtggcagtatgcaaagcaagtggttcagaactctcccccattaataagtcttctctcctgaaagaaacaattttgagacttcctgttcttaattctgtttaacagcatacttctaaaagaaaaagtgtatactgttattatttattgtgttacaaaaatatacacgcacctttcatgcacgtccgtgtgaagagaccaccaaacaggctttgtgtgagcaataaagcttttaatcacctgggtgcaggtgggctgagtctgacaagagagtcagcgaagggggataggggtggggccgttttataggatgtgggtaggtaaaggaaaattacagtcaaaggggggttgttctctggcgggcagagtcggggtcataaggtgctcagtaggggagcttttgagccaggatgagccaggagaaggaatttcacaagacaatgtcatcagttaaggcaggaacaggccattttcgcttcttttgtggtggaatgtcatcagttaaggcacgaaccggccatctggatgtgtacgtgcaggtcacaggggatatgatggcttagcttgggctcagaggcctgacattcctgtcttcttatattaataagaaaaataaaatgaaataggggtaaagtgttgggacagcaaaaatttttgggggtggtatggagagataatgggtgatgtttctcaaggctgctttgagcaggattaggggcggcgtgggaacctaaagtgggagcgattaagctgaaggaagattttgtggtaaggggtgacattgtgggattgttaaaagaaacatttgtcatttagaattattggtgatggcctggatacagttttgtatgaattgaaaaactaaagggaataaggaaaggagaaaaacaggtattaaaggtctaagaattgggacgactcaggacatctaattagaaagtgcctaaggaggttcagcatagccttgccagcaaagattatttatttattttaagagttaacagtggcggtatggggatagtaccaggagataccagctgtgctggcttggagaaacagtgtaaactggcagtgtaaacaagagcagggcatgtgtgagtagttgagaacggtgaataggagtatgactagacagaagatagtagggatgacaagttttttggggcacaatctaagttggtctggtgtctggaatgagactggggcctaataaaaaggagtgtctacacaggagcttaaatgggctgtatcttgtagcattccaaggacaggcctgaattctggaagcgaaaatggtaaaagtattgtccagtcctttttaagttggtggctgagcttggtgaggtgtgtttttaatagaccattagtctgtcactgaatactaagagcctgaaaaaatgcttggctgatttgactaataaaggctggtctgttagcagactgtatagaggtgggaaggctgaactgaggaattttgtctgacagaagggaatgacaaggctaaactgaagaattatgtctgacagaagggaagaaatgactgcggtggccttctcagaccctgtaggaaaggactgtacttacccagtgaaagtgtctacctagactaagaggtattttagttatcttactcggggcatgttgagtaaagctaatttgccagtcctgggcgggggcaaatccttgagcttgatgtgtagggaagggagggggcctgaataatccatgaggagtagtagaatagctgatgcaacactgagaagtgatttctttgaggatagatttccacaatggaaaggaaatgagaggttctaagaggctggctagtggcttgtaccatagcatagcctgcctttgctggtgtgtggcgattaggcctggtggaaccgccatcaataaactaagtgtgatcagggtgagaaacagggaagaaggaaatgtggggaaatggggtgaacgtcaggtggatcagagagatgcagtcatgggggtcaggtgtggtatctggaataatgtgggaggccagattgaagtccgggccaggaacaatggtaattgtgggacttaacaaagagtgagtacagctgaaggagccagggagcagaaagtatatgcatcaggtgtgagtaagaaaatagattttggaaattatgagagctgtagagagtgagttgagcatagtttgtgattttgagggcctctaaaagtattaaagcagcggcagccacagcacgcagatatgagggctaggctaaaacagtaaggtcaagttgtttggacagaaaggctacagggtgtggtcctggctcttgtgtaagagttctgaccgcgctaaccatgcctaggaaggaaaggagttgttgttttgtagaaggtgctggggcttgagagatcagtcagacacgatcagcagggagagcacgtgtgtttttatgagaattatgccgagataggtaacagatgaggatgaactttgggcttgactgaagtaatgggggctgtctgtgaaaccttgcagcagtacagcccaggtaatttgctgagcctaatgggtgtcagggtcagtccaagtgaaagcgaagagaggctgggacgaggggtgcaggggaatagtgaaaaaagcatctttaagatcaagcatggaatagtgagttgtggaggaaggtattgaggacaaaagagtgtaggggttgggcaccacagggtgcataggcaaaacaatttgataaggcgcagatcctgaactaatctgtaagacttttccggtttttggacaggtaaaatgggggaattgtaaggagagtttataggttttagaagcccatgctatagcaggcgagtgataacaggctttaatccttttaaagtgtgctgtgggatgggatattggcattgagcagggtaagggtgattaggttttaatgggatggtaacgggtatgtgatcagttgccagggaaggagtagagatgtcccatacttgtgggttaaggtgggggaataggagaggaagacgcgaaggaggctttgggttgaggagaagggtggcaatgagatgcggctgtagtccaggaatagtcagggaagcagataatttggttaaaatatctcggcctaataagggaactgggcaggtggggataactaaaaaagagtgcataaaagagtgttgtccaagttggcaccagagtgggggagttttcaggggtttagaagcctggccgtcaatacccacaacagttatggaggcaagagaaacaggcccttgaaaagaaggtaatgtggagtgggtagcctccgtattgactaaggcgacggacttaccttccaccgtgagtgttacccgaagctcggcatccgtgatggtctacagagcttccgaggcgattgggcagcatcagtcttcagccgctaagccgagaaggagtcagagagccttgggccagagttccaggggctctgggagtggctgccaggtgagttgaacagtccgatttccagtggggtcccgcacagatgggacacggcttaggaggaatcctgggctgcaggcattccttggcctggtggtcagatttctggcacttgtagcaagctcctgggggaggaggttctggaggaacgcctggccgctgcggttcagttcccttcttgtgtgctggagatgtggctggggtttgtctcacagtggaggcaaggaattgcaacttttttctattattgtacaccttgaaggcgaggttaattaaatcctgttgtggggtttgagggccggaatttaatttttggagttttatttaatgtcgggagcagattgggtaataaaatgtgtattaagaataagacggccttttgacttttaagggtctagggctgtaaagcttctcagggttgctggcgaacgagccatgaattgggctggatttttatatttgatgaaaaagagcctaaacactatctgatttgggataaagaaaaaggagcattaaccttgactatgcctttagctccagccacctttctaagagtaaattgctgggcaggtggaagagggctagtcactgaacgaaactgtaagctggaccaggtgtggggaggggaggtgataaaaagataatacggtggaggagcggaggctgaggaagaattgggacctagctcagcctggggaggagggagaggtcagacgggtctgtagaaaaggaagattagaaagactcagcgacgcttggggttgagactgaggggacaggcaggagggaaagaaggaagatttgggacgagttgcactgggcacagagactaggaagggactgatgtgtaaaagaatgcctggacgtcaggcacctcagaccgtttgcccattttacgacaagaattatttagatcttgcaggatggaaaaattgaaagtgctgttttctggctatttggaactgctgtccagtttgtattggggtcaagcggcattgcagaagaaaataaggcatttaggttttaggtcaggtgtgagttgaagaggttttaagtttttgagaacacaggccaagggagagaaggaggaggaatggagggtggaaggttgcccatagtgaaggaggcaagcctagagaaaagagagagtagagacacggagggaaggggttcgggagttcttaccttccagaaaagcgggaaaggggttggggcatggatataaggggttggggcacagagataagaggttggggcatggaaataagggatcagggtgcagagatacgaggttggggtacttgcccctctagaaaagcgggacttgccgctaagagtgaaggagaaggggttgggggtttcttgccccccagaaaggtggagaaggggtagagacatggagaggaggggttggggaacttgccccttccccagaaaagtgggacttgccactaagggtgaaggaccaaggcaggcatccctgcgtgatctgacacctctgaagcgtgggtatataatcagagaggcgtccctgcaatgattaaacgccaagggaaggctgccttccctagtccgtgaccggcgccggagttttgggtccacagataaaacgtgtctcctttgtctctaccagaaaatgaaaggaattgaaattaagagaagggagagattgaagagtggaaaggagaaagtggttgagggacagtgagagaggttggagaagagagtaagaagaggtcgcttacccaatttaaacttggtgagatgttccttgggctggtgggtctgaggacctgaggtcgtaggtggatctttttcacagagcaaagagcaagacaggggattgatctcccaagggaggtcccccgatccaagtcacggcaccaaatttcatgtgcgtccatgtgaagagaccaccaaacaggctttgtgtgagcaataaagcttttaatcacctgggtgcaggtgggctgagtccgacaagagagtcagcgaagggggatggggtggggccgttttataggatttgggtaggtaaaggaaaattacagtcaaagcggggttgttctctggcgggcagagtgggggtcacaaggtgctctgtaggggagcttttgagccaggatgagccaggagaaggaatttcacaagacaatgtcatcagttaaggcagtaacaggccattttcacttcttttgtggtggaatgtcatcagttaaggcaggaaccagccatatggatgtgtacgtgcaggtcacaggggatatgatggcttagcttgggctcagaggcctgacagcacctacctaaaaaattccaatagcactaaaagggtgtgtacaaaatgcagtggctgactaaccatctcctccattgctccgcctaagagacacccacttttagctgttttctttaggaacttgttaatattaggtttctaaaaacatgtaaccatgtgaatgagcttagacttactggattcctatcataataggcggggccttagttattctacagcgttgttcttactgttttttctcttccaatgtttatctctatgtctgcatatcaacattcagtatcacattttttttttttgagacagagtctcactctgtcacccaggctggagtgcagtggcgcaatctcagctcactgcagcctcagtctcctgagtagctgggactacaggcgtgtgccaccacgactggctaatttttgtatttttagtagagacagggtttcaccatgttggctgagctggtctcgatctcctgacctcgtgatctgcccacctcagcctcccgaagtgctgggattacaggcatgagccaccacgcccggccagtatcacatgtttatacccacagatattcgcagccgagaattttcgggtaatataacttgcttcttttatttttgttgttgttattgttcccctaaagtttatatttgttttttatttttattttcttttgaggcagggtctcactctgtcacccaggtttgacagcagtggtgcaatcatggctcactgcagcctcaacctccccgggctcaggtgatccccaacctcagcctcctgagtacctgagagtaggcatgtggtaccacacccagctaattttttatattttttgtatatgagacaaggtttcaccatgttgcccaggctggtctcgaactcttaggctcaagcgatcccgcctcagcctcccaaagtgctgggattacaggtgtgagccactgtgcctaggctatactggtctttttaaaatctacttagtttacttgacctctaaaattatttttcctctgtcttctgatagcatctcagtatgattttccactatgttaagacgaggaattgacccattcttacatttggaggcttctctaagcaactttcccattcccccttcacccaagctgtgtgctcactagccctgattcacagccgtcgtcctggaacttcttggtgccatccttctgtcttttcccaagtgactcacctacctcaacctcccaaagtgccgggattacaggcgtgagccactgtggccagccattcttttccttttttaaaacaatttttatcttctttattttaagtagagatggggtctcactatgttgcccaggctggtcttgaactcctgggctcaagcgatcctcctgccttggcctcccacagtgctaggattacagacatgatccactgcacttggcccagtggtacagttttacactcattagatggtcaagaaatgcctaaacgctataataaatatagaactttaccttgagaagacctaacatttccttcagaaagtaaatatgagaggggtggagacggtgcattatcttatttttatgattttaaaaatgtatacagaattgtacatatttatggggtggacagcaatattgcagtacatgtatacaacgtgctatgatcaaatcagggtaattgacatattcatccctgtattttttgagacaaagtcaggcttcgtcacccgagctagagtgcagtggtgtgatctcagctcactgcaacctctgcctcccaggctcaagccattctcccacctcagccccctgagttgctgggagtatagggatgcaccaccacacctggctaatttttgtgtttttttgttttgttggtagagatgaggtttcaccatgttgcacaggctgatcttgttttctaatgtgaagggaagcgggcaacgtgctagttttacactaaggaaaatgaatgacatacccaaactgcctgcaagacccgttctgagagacgaaaggagatttgttagaccgcagtgggagatggagtgagggtgagagtttctggggaaaaccagacaagagcacagagggccaaagggaagcacgggaggattttgcacagaggatggaacagagtcaaccctgagagctgggaaccttagagatccgtctggagcccatattagagaggttgaagaaagaggccagtatgtggtccagccagggtaccatgtcatccacagtgtgcagggaggaggatggggtctccacagattccttccatcccaaatggagggtgccctcagacagagaggcagacagacagacagacactggccgaacggctccctgatggaacaccaggaggaggcagcatggcctcgtttccacagctgtagcctctgccctcctgcttccacgctccacacacgccagtctttgagtcgcctcccatgccatgatccctcccttggatacgaccgtgcctggggttcagcggtcatgaacataacccgcggctgtgaacatcctgtcggcctccatcctgacccccgtttgatttccgggtcagcgggaggggcgggaggggcggaagcggcctctgcacagccctgcccctgtgccgcaggcgcttcctccggctgtgccagtcctctgccagaaaccccgccaggattattaggatcacagccccgaggcatatccggaccaggttgcccttggtgtagtactggcgggcaggacctggaggaatgaggagaggcaggagcaggtgaaagagcccacctccaggaccccctccaagccacatctgggcttctcagagatcctattattctctactagctaggggatgccgctcactttcctggagggtccctcccttcccgagtaggggtcagggccagatgaccccaattctctaagtagcacctctccctcctgtgctctcacagggctctgagacaactcctccccagacacagatgctgcctcgttatctgatgcattgcaaaagagaggacagttataaggggtggggaagagatggaatctctctttctctgaccctttttaaaatctcaaccttcccacctgatcttaatgcccaattctgaaccccatacgctgatattctgcctttactctacacactggaacccaagatctgagagctgcagcccctgcgtagacaaaggagttggctttggtgaagagacgggtgagaaggaagggggtctggagaggatgacttactcaccagctggagagtctgactcctttggactggcggtgatactcctagaagtctctgggaaccaaacaaaggctaagtgtgaaatgaaaccatattcccgccccctgtcactgtgcctactccgaacacacacacacatggggaggcacaattccacagcatttaagaaaagcatgggccgggcacggtgcctcatgcctataatcccagcactttgggaggctgaggtaggaggctggcttgagtccaggagttcaagaccaacctgagcaacatagaaaaaccctatctctacaaaaaaatacaaaaattagccaggcgtggtggcacgtgccagtaatcccagctactcagtggaggctgaggcaggaagatcacctgagccctgggaggttgaggctgcagtgagccaggattgtaccactgcactctagcctgggaaacagagcgagaccctgtccaaaaaaaaaaaagcaagaactgtagagtcaggctgtcctccagatttgaaccccaactctatcacctattagatgtcagttatctggcaagtgactcagcatctgtgagccagttccccatgtgtccaataaaattaacaagatcccttataggttgatgtgaaagtcaagataataataatggtagaaatataaagcaccgtgcttgacatatgagcacctcatacgtgccagcttttttttttttttttttgagacagagtctggctctgtctcccaggctggagtgcagtggcccgatgtcggctcacttcaacctccgcctcctgggctcaagcgattctcctgcctcagcctcccgagtagctgggactacaggcgtccgccaccacgcccagctaagttttgtatttttagtagagatgggatttcacc[137 bp omitted]caggtactcagccatgtgctgggccatgggaacccaaatattaataagacattgtcaggccaggcatgacactggctgaatgcctgtaatcccagcactttgggaggccaaggtgggcggatcacctgaggtcaagagatcgagaccatcctggccaacatggtgaaaccccgtctttactaaaaatacaaaaaatagctgggcatggtggcacacacctgtagtcccagctactcaggagccggagattgcagtgagctgagatcgcagagtgagccgaaatcacagatcacagagtgagcagagtgagactccgtctcaaaaacaacaacaaaaaacaaaaaaaccataagacattgtccatctgcggttcccagactattgcaggagaccaaaaagtaaagcgatttttttttttttttaatacggagtctcactctgttgcccaggctggagtgctgtggtgtgatctcaggtcactgcaacctccaactcgtgagttcaagcgattctcctgcctcagcctcccaagtagctggaattacaggtgcccaccaccacgcccggctaatttttgtattttcagtagagacggggtttcagcatgttggccaggctggtctcctgacctcaggtgatccactcaccttggcctcccaaagtgctgggattacagacaaagcgataattttaatatactgtaaaaattgctgtaataggcagcccacaagacactgagcgagagcagaggaaaccatcgatccagcctggacggtcaaggctttcttgaggaattgatgccatggggaaatggaagaaaaggcagagtgagtgggttgggtgcagagtcaggagaggttaggaagcctccaggagagcttcaagtgactgtgtgtggctgagaacagcatgggaatgcgtggaaggtatgcagacaaaattggagggatcaacaggggctggatatctaagctcacagaatagcaagctgaggaattggaactgcatcctgagggtgattgggaggttccgaactgaagatagggaaggcttccatcacagaactccctgggatatgccgggcgcggtggctcatgcctccaatcccagcactttgggaggccgagacaggtggatcatgaggtcaggagttcaagaccagccttcccaagatgctgaaaccccgtctctactaaaatacaaaaattagccaggtgtggtggcatgcacctataatcccagctactcgggaggctgaggcaggagaatcgcttgaacccgggcagcagaggttacagtgagccgagatcgcaccactgcactccagcctgggcgacagagcaagactccacctcaaaaaaataaaaaatagaactacgtgggatcaggtgcctcatgaaagccagagtcatgtgggcccagtggaagtatctaacctattatcagggaatctgtgaaggtgtttagtctggaaggaaatggagattttccaggacaggcaaggggaaagagactgaggaaagcgtatctgcagaggcctggagcggttagaagatgtgctgtgtccaggtgcctacagtctgtgtgcgtccgagcatgggctctacctggacacagtgaggagcgagattaaatacctggatcacagccgagtccaaagcctaggacttcatcctgggagcagtgcgtagggatggcggtcgtcccgccacagccttggctccgccatctttgaaatggccccatcacccaaaacgctcctccttctgaaccccagagctccactctgcacccatgctctagcctcacaccaaggactttcttggtaagagacggacagttcggtgaagtgattaaaagcctacaggcttagataatggaagagagagctccgtcctcacactcctttctgctgagcatgaaatgcctggttactcaccagttgtgaagacttcgtttgtgaatgagacggtcagttcagcggtggcttctgagaattctaagaaagcaaaacaatgttaggtcttccccgtggttccctatatcctctagatatctccattccccttttgagatatctaggctccctgaaacccctttctctgacacactgcacagacactgaagacagacaaattcgaaaggtgtaagacttatcttccatgaccggcttagtaagaagcagatccgttcagcaattgatagacacttggttttttttccacgttttgctgttatgaatattgctgctgtgaacattgacgtacaggtttttgtgtgaacataagttttctgttctcttgggtacacacccaggggtggtggaatcactgggtcatacagtaactctgtgttttactttttgaagaactaccagacttctttcttttttttcttttttttttttttttgagacagagtctcattctgttgcccaggctggagtgcagtggcgcgatctcagctcactgcaacctccacctcctgggttcaagcgattctcctccctcagcctcccgagtagctgggattacaggcacctgccatcacgcct[139 bp omitted]tgtttttcaaagcagctgcaccattttatattcccaccagcaatataagaaggttcttccaaatcctcaccaatacttcttgtccgtttgttttgttttaaaaatcatagtcatcctagttggcatggtgaattttatggtatgtgaattatatctcagtttgaataataagatgtggatccatgtcttcgtgagcctagaggaagaatgagctcgtgttagcctcagaacacgggatctccaccttccaacttaggccattttctttttttctttttttttttttttttg[132 bp omitted]caccacgcctggctaatttttttgtattttcagtagagatggggtttcaccgtgttagccaggatggtctcgatctcctgaccttgtgatccacccgcctcagcctcccaaagtgctgggaatacaggcgtgagccaccgcgcccggccaggccattttcttaaccaggggcctcctgaggccaccaaaatattcctgaactgcctcagctgataaatacgaagctcttgttgcagtgggtactatcctgggagtctttttatggtggaaccagcttggaaaaaactagtttatgctcagctctcggtggcataatgagagtgtgggtattatttggtctttgttatttctcttcgtgtgagatgcattaataaaccttttttttttttttcaattaaaatttcagttccagaatccatgtgcaggacgtgcaggtttgttacataggtaaacgtgtgccatggtggtttgctgcacccatcaacccatcacctaggtattaagccccacacgcatcagctatttatcctgatcctctccctcccccaattccccctacaggccccagtgtgtggtgttcccctccctgtgtccatgtgatctcattgttcagctgccacttacaagtgagaacatgcagtgtttggttttcagttcctgtgttagtttgctgaggataatgttttccagctccatccatgtccctgcaaaggacatgatctcattcctttttatggctgcatagtattccatggtgtatatgtactgtatttgctttatcctttctatcattgatgggcatttgggttgattccttgtctttgctattgtgaatagtgctgcaatgaacatatgtgtgcatgtatctttataatacaatgatttatattcctttgggtatataaccagtaatgggattgctgggtcaaatggtatttctggccaggcgcagtggctcacacatgtaatcccagcactttgggaggccgaggtgggcagatcacctgaggtcaggagctcaagaccaccctggccaacatggtgaaactcccgtctctagcaaaaatccaaaaattagccaggcgttgtggcatgcacctgcagtcccagctactcgggaggctgaggcaggagaatcacttgaaccctggaggcagaggctgcagtgagccgagatcatgcccctgcaatccagcctgggtg[148 bp omitted]aaaaccccatctctactaaaagaaaaaaaaaaaaaaaagccaggcatggtggcaggcgcctgtagtcccagttacttaggaggctgagacaggataattgcttgaacctgggaggtggaggttgcagtgagccgagatcgcaccactgcactccagcatgggctattgagcaatactacatctcaaaaaaaaaaaaaaggaaaaaggatttctggttctgggtctttgaggaatcaccacactgtcttccacaatgaactaatttacattcccaacagtgtaaaagcattcctatttctccacagcctcgccagcacctgttgtttcttgacttttgttggttttttttttttttttttgagatggagtcttgctctgtcgcccaggctggagtgcagtggcacaatcttggctcactgcaacctccgcctcccgggttcacgccattctcctgcctcagcctcccgaatagctgggactacaggcgcccgccaccacgcccggctaattttttgtatttttaatagagacggggtttcaccgtgttagccaggatggtctcgatctcctgaccttgtgatctgcctgcctcggcctcccaaagtgctgggattaccggcgtgagccaccgtgcccggcgtttcttgactttttaataatcgccattttgactggtgtgagatggtgtctaaatgtggttttgatttgcatttctctaatgattggtgatgttgagcttttttttgtatgtttactggctgcataaacgtcttcttttgagaagtgactgttcatgtcctttacccactttttaatggttttttttttcttgtaaatttgtttaacttccttgtagattctggatattagacttttgtgaattgatagattgcaaacattttctcccattctgtaggttgtctgttcactctgatgatactttcttttgctgagcagaagctctttagtttagttagatcccatttgtcagtttttgcttttgttacaattgcttttgacgtttttgtcatgaaatctttgcccatgcctgtgtcctgaatggtattacctagattttcttctagggtttttatagttttcgggttttgcatccaagtctttcatccatcttgagttaatttttgtacaaggtgtaaggaacgggtccagtttctattttctgcatatggctagccaattctcccagcaccatttattaacccacagccaatttcatactaaatgggcatttcccttgaaaaccagcacaagacaaggatgccctctttcaccactcctattcaacatagtattggaagttctggccaggataatcaggcaagagaaagaaataaaggatactcaaataggaagagaggaaatcaaactatctctgtttgcagatgacatgatcctatatctagaaaaccccatcatctcagcccaaaagtttcttaagctgataagcaacttcagcaaagtctcaggatacaaaatcaatgtgcaaaaatcacaagcattcctatacaccaacaatagacaggcagagagccaaatcatgaaggaactcccattcacaattgctacaaagagaataaaatacctaggaatacagctaacaaggaaagtgaaggacatcttcaaggagaactacaattcactgctcaagaaaatcagagcggacacaaacaaatggaaaaacattccatgctcatggataggatgaatcaatatcgtgaaaatggccatactgcccaaagtaatttatagattcattgctattcccattgaactatcattgacattcctcacacaattagaaaaaactataaaattcatatggaaccaaaaaagggcccatatagccaagacaatactaagcaaaaagaacaaagctggaggcctcaggctcagacttcagactatattacaaggtgatagtaaccaaaacagcatggtactggtacaaaaacagacacatagaccaatggaacagaatagagatctcagaaataagaccacacatctacaaccatctgatcttcaacaaacctgacaaaaacaagcaatggggaaaggattccctatttaatacaccttgttttgattttgatttcaacacagcgtgtggtatttgcatgccatgtgatacagtttgaatatgtgttcccaccaaatctcatactggattatgatccccaatgttggaggtgggggcctggtgggaggtgtttggatcataggggtggatccctcattgcttggtgctttccttgcaatagtaagtgaattctcacaagatctggctattgcaaagtgtggcatgtcccccagtcccaactctctctctctcttgctcctgctcccaccacatgagacagctaccccctctttgccttctgccatgactgtaagcttcctgaggcctccccaaaagcagaagccagccttctgcttcctatacggccttcagaaccatgaaccaattaaacctcttttcttatcaatgatccagtctcagatatttatagcagcacaaaatcggcctaatatagcatgaaatattgctcagcaatcaaaaggaacacatcattgatacatacagcagcttggatgggcctcaggggcattgcactgagtgacaaaaggatatctcaaacggttgcatactggatgatcccatttacatcagattctagaaatggaagattatagagatggagaacaaattaatggataccaggagttagggatggcaagggaaggagaagggtgtaggtgtgaatataaaagggtagcccaagggaggcccttgtgagacggaagagttctgtacagtgactgcggtgatggtgacgcgaatctacaactgtgacaaattggcatagaactagacacctactttatgccaatgtcaaattcctggtttttatgttgtactctaattacgtaagatgtaaccattagaggaaactggaaaaagagcacatgggattcttctgttctatcattgtagacttcctgtgactctagaaccatttcaaaagagaaagttcaaaaattcagtcagaagcacacgcacacatatgcacgcatgcacacacacacatatgcacgcatgcacacacatatgcacgcacacacacatatgcacgcacacacgcacatgcacgcacacacacatatgcacgcacacagtatgtgaccatcttccatgtccctgcccactaggcataatagccctcactctgccctcaaccccgcaaatctcatccttatcaacctcggctctttccagcatgtttctcctgccttggtgcttcactctgagacacagggaatgttagacacgcccagcctccagcctagcgtatgatattcttaaagtgcaggccgtagtctggtacaccgtattcagctgagatgtttgtgaaagtggaggggataacacgcctcacacaaaacttaccgcagtggttctcaaagcagcattctggagccatagcatcagcatcacctgggaacttactaggaatgaaaatgactggattcaccccagacctactgaagcagaagccctgggggctcagaaatctattctttaagcctccaggtgattcttatgctcatggaagtttgagaaccgctgatcaatgcattcagtgactcagaaacagagtcccggactctacaggtttgttggttggttggttggttggttggttggttagtttgtttgtttttgtcacccatattcaaccagctggactccacagtatagcaagccactccgattattcttctgcatgttatatgtgataaaccatccacctagagtaggattgggggcagcatcttaacatctaactacttaggacacccaccctgtttacaggcagaaataaaggatttttaaaacaaagcaaatctgtgaaagaaccaactgaattaaatcgagaagtctaggcagagaggagagagagaaggggtccgtgtacctcatacgctgtgcaccagaatggaccctgcagaacctacctgctaccggggaaggtggttctgttggtaaccggctgggggtcacagaggttcctgggaaatcagaaaatgagataaatctgtgctctgtcgctgtgggtcctgaacaaataacgaaacatctccgtgactgagtttcctcaccggaaaaatgagcctaaagtagcttacatcactggactgttgtggatgttaataagcatttgagctgggtgcagtgcctcatgcctgtaatcccagcactttgggaggctgaggagggcagatcacttgaggtcaggagttcaagcccagcctggccagtatggtgaaaccccgtctccactaaaaatacaaaaattagccaggcgtggtggtgtgcacctgtaatcccagctgctcgggaggctgaggcaggagaatcacttgaacctaggaggcagaggttgcagtgatctgagatcgcaccactgcactccagcctgggtgacgcagtaagactccatctgaaaaaaaaaggcttagccaggcgtggtggctcacacctgtaatcccagcactttgagaggccgaggcaggcagatcacctgaggtcaagagttcaagaccagcctggccaacatggtgaaaccctgtctctacgaaaaatacaaaaattagctgggcatgatggcaggtgcctgtaatcccatctactcaggaggctgaggcaggagaatcgcttaaacccaggaggtggaggttgcagtgaactgagatcactccactgcactccagcctgggtgacaaagtgagactccccccaaaaaaaaaaaaaaaaaaaaaagcagcagcatttgtaaagcacacctggcacattctgggctattaacaaggaaatgcatgcagctcccgtccacctttttcaacctcagttctatttcttctggattcctgtgtcctacccctcactgtgaccctgggggcaaaacagatttttctaccaaaaactaaatgatgtattttgtttgatttaatatgacattgttaaatgtactgatcagtggcgttgggtatgttcacattgtggtacaatatgttgacctctagaacttatttttcttgcaaaactgaaattctgtgcccattaaacactaattccttctctctcctctttctggcccttaacaaccaccattgtactttgtgtttctacagtgttgacattagatacctcctttgactagaatcatacagtagttgtccttttgtgactgacttagcataatgtcctcaaggtatatccatgttgtagtatgtgtcagaatttccttcttttttaaggctgcataatattccattgcatgtatataaccacattatgaggtatg[220 bp omitted]gaggcagcagaatcgcttgaacccggaaggcggaggttgcagtgagctgagatcgcgccactgcactccagcctgggtgacagagtgagacttcgtcaaaaaaaaaaaaaagaaacctccattctcccagctgcctgtagcccagggcttcctgccctcccacttccttcccacctctggccccgcccctgcagcccagggcttcctgccctcccacttccttcccacctacggccccgcccctgcagcccagggcttcctgccctcccacttccttcccacctacggccccgcccctgcagcccagggcttcctgccctcccacttccttcccacctacggccccgcccctgcagcccagggcttcctgccctcccacttccttcccacctacggccccgcccctgcagcccagggcttcctgccctcccacttccttcccacctacggccccgcccctgcagcccagggcttcctgccctcccacttccttcccacctctggcgccgcccctgcagcccagggcttcctgccctcccacttctttcccacctatggccgcgcccctacagcccagggcttcctgccctcccacttccttcccacctacggccccgcccctgcagcccagggcttcctgccctcccacttccttcccacctacggccccgcccctgcagcccagggcttcctgccctcccacttccttcccacttatggcccctcccttggaatggccatcaggacctataaaggctgaggaagaaaggtttggtctgcactacccctacctgtgaccacaagctccagggggtcgctgggggctgaccacaggtatgggtccctgctggagaagctgtagcatcggtaggttccgctgtgggcggcggtcaccgtgatgatgggaaaactagccctgtaccatctctcgggattcttgtagggcgcagggtccccttccttgtacagagcaaattggtcaaagccataccgagtctgacactgtagggttacgtcccctcctgacgacaccgccgggccgggctgggctgagagcgagggtttggcaaaaactcctgggagaaaaagaaagtctgatgttgaaggcaggagccagcatctcagctgagactggggaggtccccacacctgcctaagagctggggagctttttggctgtatccctcccagagagcgcactcccccacccaagctcacagagaggtcgagtcacccagtggttgaggaaggaggctgtgctcacgtcctagtgcttgggtgcaaatcctagttctgccttcaggggcctggtggccctggagacaaatctccctctgtatctgagcctcactgccttgttctgttaaaatggggatgactgaatgagacagtacacagtaatttgcagagtgcctgttgcctagcaagcgctggagtaagtaaatagcttaagcttatactgtgctgtaagcttgtattgccacatacaattgttacgttgtaaatgtggctgacagtgctagcttccgggtgccttccaaacttatgatgtatatcagttcagtgaatcctcagagacctatggagtcctcactcttaatgtccctattttataaatgaaactaaggcacatggcattaaataatttgtccaactctaggtaacaatactgcagtgtacagctgaaatttgctaagagggtagattataagtattctcacacacaaaaaagttaactgtgtcaggtgatgtatgttaattagcttgctagtagtaactgtctcacagtggattcgtatatcaaaacatcaacttgtacaccttggatatattccatttttgtttttcaattatacctcaacaaagctggacatattttaatttaaaaataaataaaaaacttgtccaagatcataagtggcagagttgaaatctgcactcacagagtttgattccagggtctccgctcctaaacacgaacctacactactctgatgtgaggttgttgtcatagaccggtgtggtgatgcatgcctgcacacaggagtcagaaaaacaaaggttgaggctgggtgcggcggctcacaccggtcatcccagcactttgggaggccaaggtgggaggatcgcttgagcccaggaaggcgaggctgcagtgagctatgatcactgtacactagcctgggtgacagagtgagaccttgtctcaaaaaaagacagagagagaaagcaaaagaaaggaagtaaggaagataaaaatataagctgcctaataattatggcattcactcaacaagaagaaaaagaaagaaagaggaaggaagggagggagggaggaaggaaggaaggaaatatataagctgcctgataactgtaacattcactcagcaatattttctcttaattttcacttaagcaactattatgtgtctgtctgtattctttttttgttgtttcatttgttttgttttgttttgttttgttttgagacggagtctcgctctgtcacccaggctggagtgcaatggcatatatatatatatatatatatatatatatatatatatatatatatatatatatatatattttttttttttttttttttttttttttttttgggaaacagaatctcactctgttgcccaggctggagtgcagtggcatgatcccagctcactgcaacctccacctcctgggttcaagcgattctcctgcctcagcctcccgagtagctgggactacaggcatgcaccaccatgcccagttaattttgtatgtttagtagagacagggtttcaccatgttagccaggctgatctcgaactcctgacctcaggtgatccgtccacctcggcctcccaaagtgctggcattacaggcgtgagccaccgtgcccgaccaggaattaaaaatagacaaccaccaccaagataaaaaaaggtatacttcacataccagatagtgaggagggccactttgactagggtggtgggggatatacttagcgagaagagagtatttgagtctgaccctgaaagaagtaatgaggcagccaggctggtccattctagtagcagagaggaggccagtgatgctgtggaggggagtgaggcagggaagaggggagggaggcaggatttataacgcggaatagaccacagtgcagctggccaggaattagggtggcgtgagtgaggcactctcctgggatgtaaaatttaattattcccaaacaattaacatatttgaaaaaattattgaaaatttgaagagtaggtcgttaaaactcacattattctgtttgaatactttattcccctgaaagatttattagaattttacattctaggcttttgtggatgcaagcgcatcagtgctatttccaaaacctacttctagaaaataaccatttaaaagtgcactaactgggtgcacctatagtcccagctactagggaggaccacttgagcccagggatttgaggctaaagtgagctatgatcatgcctgtgaatacagcgagtgtactaaagcctgggcaacatagtaagacctcttctctttttttttttttcccaagacggagtcttgctctgtcgcccaggctggactgcagtggtgcaatctcggctcaccgcctcccaggtttaagcgattctcctgcctcagcctccggagtagctgggattacaggagtgcgccaccgcgcccagctaattattattattttttttagtagagacggggtttcaccatgttggccaggctggtctcaaactcctgaccttaagtgatccacccacctcagcctcccaaagtactgggattacaggcgtgagccgccgcgcccggcccaacctcttctcttaaaaaaaataaataaataagaaaagaaattagaatatttgcaccaatcaagagtctaaggagacataaatactaaatgcactgtggggccctggacggggtctgggaacagaaataggatattagtggaaagactggtgaaattcaaatagcctggagtttacttgatataatatagttgtgtctatggttagttttttgtttgttttttgatacagggtctcactctgtcacccaggctggagtgcagtggcgtgatcacagctccctgcagcctcggcctccctggctcaagcgatcctcctgcctcagcctcctgagtagctgggactataggtgtatgccaccatgccccactaatttttaattttgtttaaagatgaggtctcactatgttgcccaggctggtcttgaactcctgagctcaagcaatcctcccgcctcagcctcccaaagtgctgggattacaggtgtaaaccactgggaccagtgctacgtttattttttggttgtaacaaatgtaagatgttaacatgaggggatcctgggtgaaatatttccattaatattatctttggaacttttctgtcagtctaaaaattactccaaaacaaagttttaaaaagaatcccgagccaagcacggtggcccgtgaccgtagtccctgctactcatgaggctgaggcaggaggattgctcaaggcaaggagctccaggctgcagtgagctatgactgctcctatgaacagccactgcactccggcctgggcagtgtagcaagaccccatcgctaatttttttaagtgcattaaaacacagataaagggttgcctgtttttcgttttggcacagactctggtatgacttgacacaggcactggctgattctgcctttatttgaaattctggtttttttcattgtggatgtttttgcaatttattttgatttttttaaaaattgcatgaaaatgttattcacagccagatgcagtggctcacgcctgaaatcccaacactttgggaagccaaggtggaaggatagcttgagcccacaggagttcgagaccagcctgagcaacatagcgagaccctatctctctctcttttgtattttaatgccttttgtgaaaactgtcaagagaccccatctctataaaaacataaaaaatgagctgggcgtggtggtgcacacctgtaatcctagctacttggagggctgaggcgggagaatcgcttgagccctggaggtggaggctgcagtgagccaagatcgcgccactgctctccaccctgggtgacgcagcaagaccctgtgtccaaaaaacaaaatattattcacattgatccataaatgtcgtggcaccaccacccgctaggccagtgcctcgtttgcctcaccctaatccctgccctcaatgtcccccgtatttgtgtcctgaacggaggaccacgcagtcccaggctccgatcccccttcctttacccgtggcaacgagctccagctggtcgctgggcagggaccagaggcttccgttctggtaggagcagcggtagcgtccagccagacttctcttcatggccgggatgaagaggactgcctgatcctggtacctgctggaactcagcttctccaggcggtacaggtccacgcccggaggtccctggcaccggagggtcactggcttctccaggggcaccagggagctgggcagagcctggagggagggcttggggagcggtcctggaagaggagcagggctgggtcagcctccccgcagaccccgcctggaccccgctgctcccgcgctggcggatcccgcaggagggaaggggtctggggaaggactcaccactctgcgctggcacacgccccagacacagccctgaggaaagaagaaagggaccagatgccaggactcgcttttatggacattcctgcctgctgggcgcggtgataagacatttgcatgcatatgctttactctgtcctaataatttcttcaaaagacacacaggaatgtaatttaagtgagagaaaccggtcagaaaaagccacatagtttatgaggtcatttacatgaaatatccagaataggtaaatctataggagatggagaagaaagcagatccatggctgggggtggtgggagaggagggcaaggcatggtggcgtactgctctctgtggacttgttcgtgttagacacggtgggctcgttcgtgttagacacggtggactcgttcgtgttagacacggtgggctcgttcgtgttagacacggtgggctcgttcgtgttagacacggtggactcgttcgtgttgtgttagacacggtggactcgttcgtgttagacgcggtggactcgttcgtgttagacacggtggactcgttcgtgttgtgttagacacggtggactcgttcgtgttgtgttagacacggtggactcgttcgtgttagacacggtgggttcgttcgtgttagacacggtgggttcgttcgtgttagacgcggtgggttcgttcgtgttagacgcggtggactccttcgtgttgtgttagacacggtggactcgttcgtgttagacacggtggactcgttcgtgttagacacggtggactcgttcgtgttagacacggtggactcgttcgtgttgtgttagacacggtggactcgttcgtgttgtgttagacacggtgggctcgttcgtgttgtgttagacacggtggactcgttcgtgttgtgttagacacggtgggctcgttcgtgttagacgcggtgggctcgttcgtgttagacgcggtgggctcgttcgtgttgtgttagacacggtgggctcgttcgtgttgtgttagacacggtgggctcgtttgtgttgtgttagacacggtgggctcgttcgtgttagacattgcccattgacttcctcagtggatgtgaggaatgggacctgagacattgctgtcccttcgtttcctcccttcagtctcccaatattaaataatatccaagtacattacaatagtatgcaattgtatagacaagtattgtaaatactattgcatattgtatattattgtattttattgtctatgtaatatatgcgataaaaccccacactaatgggatgcattgggctccaaggatggagcaggatggagcctcagcgtgtaagtcaggacgtctcagcatgtgctggccatgggtttcccggtatttacaacatttgcttgaatcagtattccatgattacatgataggatataatatatataataatcgtttcaaatagcctgaaggaggatggggaaagttcccaacacagaaaggatgcatgtttgagaagatgggtgtgctacttaccctgatctgattactatatgtatatacacatatagtgcatatatgtaaacctacatctatacatacatgtgtatgtacatatacacgtgtgtacatacacacgtgtatatgtatgtatatgtatatatgtatgcatgtgtgtgtgtgtgtgtgtgtgtgtgtatacatatgtatacaaatacatgtacataagcgatcccctcctggaattgcttgagcccaggaggtcaagtctgctgtgaggtaagattgcaccactggccgggcacggtggctcatgcctataatcccagcactttgggaggccagggtgggcggatcacaaggtcaggagttcaagaccagcctggtcaacatggtgaaacaccatctctactaaaaataccagaaattagctgggcatggtggcacgtgcctgtaatcctagctactggggaggctgagtcaggagaatcacttgaacccgggaggcggaggttgcagtgagccaagatcacgccactacactccagcctgggcaacagagcaagactccatctcgaggaaaaaaaaaaatgatattgccccattgcactccagactgacaacagagcaagaccctgtctcagaaaacgaagaggaggaggaaaaaaaaagtactaattatctgaaattccaatttaaccaggcatccagtgttttatctggtaaccctcattcttacacacacacacacacacacacacacacaaaggcgggatagttgtcattcccactgtaaacataaggaaactgggcagaggccaagcaaccttgtgtagctcacatagcaagaagtgggtgaacccagctcatgtcttgactctgagctcagagagtgacaacttgtcaccagcgcccccatagccaccaccctttgtccaccccaggctccctctgcaccccaacgcaagctccggccgcttctctgtccccctcctcctgccgcatcacagcccacctcagcctctttgtaggtttccatgcgacgctgtaccatggctgggagtcttccaggcgccgtgctgagcgccttctgtgcatggactccaagtcgccataatcgtacgggttacccaccattatcagtcccctcttatacatcaggctagtgagacagtatcttatccacagtcctacagctggcaggagtagattcaaaccctagcagcaccaattagtggtaaagagtgtggacttgggaacttacaggagtagagagcacagtggtggttaccggggcggtggggtaaggtttggggagatgttggtcagaggaggacagtttcagttggacaagaggagtatgtcttggagatctactgcacatcatggtgactgtagttaataacaacatattgtacacttgcatatcaccgatagtagattttaaatgttctcaccggccgggcgcgctggctcacacctgtaatcccattttgggaggccaaggtgggcggatcacctgaagtcaggagttcgagagcagcctgaccaacatggtgaaaccctgtctctactaaaaatacaaaaattagcggggcgtagtggcaggagcctgtaatcccagctacttgggaggctgaggcaggagaatcgcttgaacctgggaggtggaggttgcagtgagccaacgtcatgccactgcgctccagtctgggcaacagagtgagactccatgtcaaaaaataaaaataaataaaaataaatgagcgtggaatactactcagccattaaaaggagtgaaataatgtcttttggccaggcacagtggctcacatctgtaatgccagcactctgggaggccgaggtgggtggatcacgaggtcaagagatcaagaccatcctgcccaacatggtgaaaccccatctctactaaaaatacaaaaattagccgggcatggtggcgggtgcctgtagtcccagctactcgggaggctgaggcaggagaatcacttaaacccgggaggtggagtttgcagtaagccgagatcacaccactgcactccagccttggtgagagagcgagattccgtctttaaaaaaaaaaaaaaaaagtcttttgcagcaacttggatggagctggaaggcattattctaagtaaagtaatacaggagtggaaaacaaaaatctgtatattctcacttataagtgagagctaagctgtgggtatgcaaaggcatgcagagtgatgtaatggacttcagagactcagaagggaagggcagaagtggggcagggatgaaaaactacacattaggtacaaggtacactagtcaggtgacaggtgcactaaaatctcagaattcaccagaatataattcatccatgtaaccaagaaccacttgtatcccaaaagctactgaagcaacaagccagatgcagtaacctgtacaggccacacctgtaaccccaacactttgggaggccgaggtgggtggatcgcttgagcccaggagttcaagaccagcctgggcaacatagcggacccccgtaactaaaaaaattacaaaaacaagccaggcatgatggtgtacaactgtagttccagatactcaggaggctgatggggaggcactggttgagcctgggaggttgaggctgcagtgagccatgatcatgccactgccctcctgcctgggtgacagaag[155 bp omitted]cccctactaaaaatacaataattagccagacctggtggcagatgcctgtaatcccaactattcgggaggctgaggcaggagaatcacttggacccgggaggcagagtttgcagtgagctgagatcatgccattgcattccagcctgagcgaccgactgagcgagactccatctcaaaaaacaaacaaaaagaaaaaaagaatacatccatggatggataatgaatgagaggttgtttatattcacagttaaccctctcatctccagtaatgcaaccatcttcttcctgcttagccttttggagatgctgtccctttagtggtcaaattctgaagaaatcaggaaataatgcattcgacatgcccagcacaagtgaagatcaggcagcagaaatgcattcgacctgccacccatccatcaggagactatttactccactactgtaggggatactgacaaattaaatccatacctagtccagatatcaattccacaatttttttttttttttttttgagacggagtttcgctcttgttgcccaggccagagtgcaatggtgtgatcttggctcaccgcaacctccacctcccaggttcaagcgattctcctgccttagcctccagagtagctgggattacaggcatgtgccaccacacccggctaattttgtatttttagtagagatggggtttctccatgttggtcaggctggtctcaaactcccgacctcagatggcccacccgcctcggcctcccaaagtgtgtaagccatggcactcagcctttttttttttttttttttttttttttgagatggaggctctctctgttgcccaggctggagtgcaatgcctgacctcagctcactgcaacttctgcctcccagtttcaagcaattctcccacctcagcctcccacgtagctgggattacaagcacccgccatcacgcccggctaatttttgtagagatggggtttcaccatgttgaccaggctggtcttgaactcctgacctcaggtgatccacccacctcggcctcccaaggttgagattacaggcgtgagccactgtgcctggcccacattttttaaaaaaggggcaactgcagtgtagtagaacaaagttgtgaccaatgctaggatactctgttcatttcctgacccagccatgaatacactggaataactcatgcaaaatgccagctcgctggccccccgtttccccacccaacaaatgaaggggctcttacaggttcctttttgtcctgaaattcatcaccaatgcaaatttcttaaaaatcctttgtctggcagtccatgcctgtccttcagcatttcccagatctgaccctcaggactcaccaagacagaagagggcggtcggggatggagacatggttcctcagccctgtcctgagctctgtggccagggagggaagtggtgggagcctggggcacaggctcaggatgtgatgaggatgaagaatgctctcctcccttcctccaccagccccggcctttcctaattgagactcatcgagccgtagccggctcctcagtacagtgacttgcacacaagctccaaggagccgcgcttatctcctctggccagcctggcgttgcaccgtttgtccgcctgctggggcctggtctgtgttcccgtgctcccataaactccctgatgtcactaggaaaatacgcatcaaaaccacagtgagatatgacttcacaccttctggaatggctgtattttttttttttcttttgagacaaagtctcgttctttttgcccaggttggagtgcagtggcgccatctcggcccactacaacctccacctcccaggttcaagcgattctcctgcctcagcctcccaagtggctgggattataggtatgtaccacaccaggctaatttttgtatttttagtagagatggggtttcactgtgttggccaggctggtcttgaactcctgacctcagttgatccacctgcctcggtctcccaaagtgctgggattacaggcatgagccactgcacccgaccggctataattttttttaatggaaaacagcagatattggtgagtatgcagagaaattgaactgcgcgtgcattgctggcagggacgtaacatggcgcccctgctgtggaaaacagttccagcagctcctccagaagttaaacgtgggattgccataaaatccagcaattccacttcggggtacacacctaaaagaactgaaaacagggtctctaacatatttgtacacagtgttcatagcagctttattcacaatagccaaaaggtgaaaccacccacatgtccatcaacaacaatggataaacaacatgtggtatatacacaca[145 bp omitted]accccatctctactaaaaatacaaaaattagctgggcgttaaattagccgggcatggtggcaggtgcctgtaatcccagctacttgggagacggaggcatgagaatcgcttgaacctgggaggcagagattgcggtaagccgagatcgcaccactgcactccagcctgggcggcagagtgagactgtctcaaaaataaaaataaggccgggcgtggtggcccatgcctgtaatcctagtactttaggaggctgaggcaggcagattgcctgagctcagcagttcaagaccagcctgggcaacacagtaaaacccccaaaaaatacaaaaaaaaaatagccgggcatggcggcaggcacctgtagtcccagctactccggaggctgagacaggagaatggcttgaacccgggacgcggaagttgcggtgagccgagatcgcgccattgcactccagcctgggtgacagagcgagattctgtctccaaaaaataaaaaatattataaaagaataaattcagatacatgctacaacgtgatggaccttgaagacattatgctaaaggaaatattccggacttgacagataaatactgcattgtgccgcttatctgaggtatcgagaggagtcaaattcatagagacagggattagaatggtggttgccaaggcctgggaaaagtggggagttactatttaatagggagcgcttaggttgaagatgatgacaaagtctgggggatccatagtggtgatggttacacaacactgtaaatgtatttatatttaatgccattgactgttttttgttttttggttttttgagacggagtctcactctgtcgccgaggctggagtgcagtggcgcgatcttggctcaccgcaacctccgcctcccaggttcaagcgattctcctgcctc[134 bp omitted]aagtgctgggaatacaggcatgagccaccgcgcccggccagtgccgttgacttgtatgtgcacttacaggtggttaaaatgagaactatcagggtgttgatatctaaaaacctccctgccatcatcttccctacatctctcattcagtgaccatggttgaatgcctgccacctttcaaatattatgtcaggcactcagtattggcagttttatccattataaatgctttaagctgcatagaattttaaacgtgttaataaaagtagttataaatctttaatacataagctggctttaaaattattggtaaaataagattagaaatgtcttaagaattgttggcgtttttgtttgcacttattgaacgagtggtttcatgcttatccctgcagaatactatgagatttgtcataagggttataaaactataaacccggctgggcgtggtggctcacgcctgtaatcccaacactctgggaggccgaggcaggcagatcacctgaggtcgggagtttgagaccagcctgaccaacatggagaaacgccatctctactaaaaatacaaaattagctgggtgtggtggcgcatgcctgtaatcccagatactcaggaggctgaggcaggagaatcgcttgaacccgggaggcagaagttgcagtgagccgagattgcgccactgcactccagcctgggcaacaagagtgaaactccatctaaaataaataaaaataaaacatttgttttttgtagagttggggtttcactatgttgcccaggctggtcttgaactcctcctgggctcaagcaatccaccgacctcagcctcccaaagtgctgggattacaagtgtgagccactgtgcctggccctattgggtccttttaaaagatacataaaaaatcaaatgcaacagtgaagtcaatcacccgatggcagaaattggggtgctcctggcatgtggtcggtcgaagccaaggacactgctcagcattctgcagtgcacaggacggccccgcccaggcggagaatgatccggtgacacatataggtgggaaggatgcacgaatgatggcgtttaggaagaatattatcacttctttcccgtaagagcaacttagagcaagaaaatggtattattcttagggccttctctcttatggaggctccaagccagggttgccatggcagaagatgctgggcttgctttttccttgagagaactgtactcaagatgatgtaactgtcaccccgggtgccacttgggtgctttggagaagcgctcagacgcgacacgccgtgacgactccgcggcaggcagccggacctgtcctctggcgtgcggttcacgggctgtgtttatccccctggttccttcacagccaccttgggaaatacgttgcctctgaatcacgccaggcaggctctcactgtgtgtgctgcggggctggaaatcagggtgacactccgctaccgaacagcctgactaggaagccagaaagacgctgccggctttagtttgtcctttgactttccttgatatgaatgaagatagagcacttccacactgcacaacaggaaaagcccagaacgcttcctggagatagcgagggggtgatgcagcggacagctatggctgatgaccccctcacctctgactccccctccctccctgctttctgaacgcacatccatcaccaaccataggttcctgtttggggtttgctggctggaaaaaaaaaaaaaaaaaaaaggaaagctggctttctagtaaaaaccacttcctttgctcatttatcaaactcaaacgctaggagggccacctaacatcctccgtcccacgcaatggggtgtttctggagcactccggtttatcagggaccctgtcagttgccatcgcacatgtatatggggccagcccctgtgccaccgaagaggggggatattgaaaacatgttacagccaggagcggtgcccccttggttcaagcagttcttctgcctcagcctccctaatagctgggattacaggcgtgcaccatcacgcctggccactgttatgtagtttttaccacaatttaaaaaaggaaagagtgcctgggtgagtcctacgcacctattcggagaaccaaaggctttgaggttatcctcggcccacccatctgatgggagtgtttctcaaacttgcttttccgtgatctcccagtaagaaatacctactacacacacacagtctccggtcggcatgcttagggtagtcttccaattccccctcctggtatttacaccctggagtggtccgctcctcttgggctgaacctgtaacttgctcccaagcaagagcacacagcaagctcacgcacgtggttgttggtgtgattctgtttctccagattgtctccattcctccctggcttctccacagggccgctcaccatggcagccggctccatcaccaccagccagcgagagggcaagacaagagggctgacgagggacgctaccatcacagaggtcagttttgtaacctaaccacaagactaacctactgtcacttctgccctatcctactgctagaagccagtcgctacatctcccccacactcaaagggaggtggtcgcaccgtggggtccactggaagttgcctaccagactcaggtcatcccaaacacaccctctagccatttggtgtggcatcggaaagaaaactaaggccaggtacggtggctcatgcctgtaatcccaacaatttgggaggccatggcggaagggtcacttgagcccaggagtttgagaccagcctgggcaacatagcaaatgttatgttgccacctctacaaataattagccaagtgtggtggcatgcacctgtagtcccagatactcaggaggctgaggcaggagaatcacaggtcgaggttgtagtgagctgtgacggcactgcactccagccttggcaacacagtaagacctcgtctctaaaaaagcaaaaagggctgggtgcactggctcacacctataatcccagcactttgggaggccaagacgggtggatcacctgaggtcaggagttcaagataagcctggccaacatggtgataccgtctttaattagccaggtgtggtggtgggcgcctgtaatcccagctactcgggaggctgaggcatgagaatcgcttgaacatgggagacacaggttgcagtgagctgagatcatgccattgcactccagcctgggcaacagagcgagactaggtggctgttctgtgtactgtgggatattgagtagcatccctggcctccccagtatctcaaatatgaaaacatgttttctatctcgattactgagcttttcggtgcctccttcggttctgcacctaagctaagagccccttcatctcaccctgatctctatccagtttctaacacagcagtcttgtaagatgcccggacttaaacggttatttcctgtgaaacaggtgaaaggggctttcatctctaaaaagtcggaacttttttttttttttgagacggaatcttgctctgtcacccaggctggagggcagtggcatgatctcggctcactgcaatctccgcctcccagcttcacaccattctcctgcctcagcctcccgagtagctgggactacaggcgcccaccacca[141 bp omitted]ctgatgccttgtttcctaaaaggaataaagccatgagttgcctttgttcagctcatgggcattcacccatgcacagaggaaaaataaaatctacgactcgggtacattttcttcttttttttttcttttaaatgagcaagtttgagagtctgcagtttggactaccatgagaattgataggaaggtgggagtcccaggcaatcccaggtcctgtagcagcagctggtggggttcccactccatgccgtgcagagcctgaactcaggatgacacctgcacctgctctctggctgggctctggcacaggaagccctcagcaaacacccccggcacagccatgccatagccagacaacagctcgctgtaccacaccatcatgggagacagcagttattctgagcatctcactgctgaagaaaccaaggctcagagaggaccatgcatgcacaaggtcccacagggacccaagaatccaccaagtgtcagacaacttgcccatgctcttcacggagcaccttggaaccctccccgacaggcaccgctggctctcctgacgtggcctgcaagtgcacggagccccttcctcctcggccattcccagtttagattcccaggggaagcatcagatggcccctctcccctgctggcagcagagcagacggaaccagccagagcccagggcagtgctcacctgcaggccagtccactgcggccagcaccgccccctagaacctactgcgggcatggcggccgccagtcctgggtctcccggctcaggtagtgccaggaagctgcgggcatggcggacagctgtcctcggtctggaggcgccatcctggctttcaaatctgctccagaggttatctggggaggggctgctccctcacagagggagcctctaagcccaccaggcgggcactttcagcccaaagcctccgggccacctcctcatcctcagcctcgggggccggggccttctgtttgagtccatcgaagtactttccggaaacatccgccagttcctccgccacggccaggtatgtgctgggctgggcggccagctcggggctcttgaccagcagccagaagatgggccctgcaatcagcccacagggcatttagtccacactcgctcagagagaaggaaggaagccccgctccccggtcagggagctccgggtccctggagtcccacagagccctcctctagccctttccccttggctgcctccatctgcagttcccttccctggcactgcccaggcaaatcccaccagaccagggatcagaccaaaagctgcctcccccaaggagccttcctggctttgtccaggaaaatggaagctctcttcctcttggtcagccccagtcctcaccctaccccatttctcctttaataacatcttattaaatgcacctg[136 bp omitted]accccatttctactaaaaatacaaaaattaactgggtgtggtggcgggtgcctgtaatcccagctgctcgggaggctggggcaggagaatcccttgaacctgggaggcggaggttgcagtgagctaagatcacaccattgcactccagcctgggtgacaat[132 bp omitted]cgtgtgaaaccctgtctcaactaaaaataaaaacttagctgggtgtggtggtgggcgcctgcaatctcagctactttgggaggctgagacaggagaatcacttgaaccgaggaggcagaggttggagtgagccaagattgtgccactgcactccagcctgggtgacgagcaaaactccgtctcaaaaaaaaaaagacatttatttatttatttattgagacctggtgtcttgctctgtcacccaggctggagtgcagtggtgtgatctcagctcactgcaacctctgcctcccgggttcaagcgattctcctgcctc[134 bp omitted]cagcctcccaaagtgctgggattacaggcgtggctattagcctcgccaagttaagattcttgatgccaaccaatcacccactccatgtttttcaggattataaacactagtcataaagcatgaactgcctgggggtggtggctcacacctgtaatcccagcactttgggaggcagttggatcacctgaggtcaggagtttgagactagcctgaccaatatggtgaaaccccacctctagctgggtgtggtggtgtgcacctgtaatcccagctacttggagacaggagaatcgcttgaacctgggaggtggaagttgcagtgagtggagatcatgccattgtactccagcctgggcgacagagcaagacttcatctcaaaaataagtaagtaaagctccaactgtttgttccacctattctctgggcggggtcctgtgctggccctttcaaggaaggtctcgtataacccccccagtgactgtgaggtgagtcctattaaggcctgcactctgcagatgaagaaacaggctcagaggggtaacagctcttccccaggaggtgcagctggtttggggtgaagctggagttaccctgagtacagcctgactccaggcgtcagctccacggcctcttcctctgagacacggttttctcatccgccagcagggctctgcctgcttcccggggctgttagaggctggcaggccaggtcaacggaggaaagggacctgtgctctgtgcctcagaagacgtaggcgaggagcaggcatgaggcctcagggacggtctctgagggagggtcctgggccctgggctgagaaagcaggggtggagggctccacgtggagaccccaggctgggaggggactcaccgagtgtggtgctggagaaggtggagccatggatgcccgtgtgtctgcccagctctgtcctggccacgccggggtgcagggcgttgacagtcacaccagagcctggggaagaaagaaagagaagactgagggaggggtccagcctcacctgggaggctgtggcagcccacacccagctgtggggcttccgggcaccaggctgcttcctgcactcaaaccccatcgtccctcttgctctggaatcttagtgaagtggtcttatcttgcggagcggctctgccacatggctgctgggagccgagctttcctggagggcttcataaacccagaacgctgagcttaccccgggagcctgcatcggtgcgtggcggtgggacctaagatactgtaactctgaccagctcccagtggggctggcaccgctggtccacagaccgtctttcagaagcaaaggcctagcacagatttctcaatctcagcactgtggatgctgtgggttgggaggagtgaggggccatcccgtgcgctgtaggacattgagagcatctgggcctttaccctccagatgcccagagcaatctctccccaagccagctgtgatcactgtgtttccaggcattgacaactgcgggtcaaaactgcccctggttgagactcactggctggagccaaaaggctgagctgcctgcccaacagcagcagggaaggacatctgatccaggcagactagaccacctgggatgaacagacaatcctcagaagaacgatcgattagtgatgtctgcttcaggcaccagaagcgggcagcgtggtccacatgctctacttttgctgactctgttctggatccaccgtttggcctcccatcagcctaggatcatggaaaggccgctctaggctcagagtaaagcaagagggaggccgagcctagcgcccccgtaccttgcagccgccggctcagctccttggtgaagaggacgatggcgagcttgctctggcagtaggcggctttggtgttatacttcctcgtctgccagttcaagtcgtcaaagtctatgtgcccagcaacatgggccagggacgagaggttgatgatccgcgaaggggctgaggctttcagcttgtccagcagcaagtttgtcaagagaaagtgacctggattaaggatgatgaaaaggtcacttttgactcacacctaaaatcccagcactttgggaggacgacgggggaggatcgcttgaacccatggtgcagcccctgcccaggcctcacccaggtggttaacgccaaactgcatctcgaagccgtcctcggtggtccagtgggggcaccgcatcacacccgcgttgttgattagaatgtccactcgctcctcctctggaagagaggggtggaggaggagacatcccggtgaggacagaccccagcctgatgcaccagcagaaacactcctgtgctcccacaacctgtgaatgtggcctgtgccggaaacagggtctgtgccgaagtggccatgtcaggatgcggtcattagggtgagccctaatccaatgactggtgtccttataggaagggaaaacagagacagagacacatggggagaaggccatgtgtggacagaggcaaagaccggagaggcacagctccaaggtgagggtgggccgcccccgctggaagtggaagaggctgggaggattatggcccgtctcacaggtcacagccacagggacaccgcgattcagactgccggcttccggaaccgtgagggaatgcacgtctgagggtgtaagccactgggtttgcagtacattgttacagcagctccaggacactcacacgccctccgcacctccatctaagccttgggactccttcctgccggagccccgaggccaaaaacgggaggttaccggtgggagccccggcaccgcaggcgtggtttcattcccaaacctgccacctcactcatacaagcaaccaaaggacacacagatggagactgcagcctcagtttcctcagctgtaaaatgcgctgaaccacagggccttcctccctgtaccactcagctcgggttccgtaac[141 bp omitted]agaaaccgcgtctttactaaaaatacaaaattagccaggcgtggtggcatgcacctgtaatcccagctactcaggaggctgaggcgggaaaatcgcttgaaaccaggaggcagagggtgcagtgagccgagatcgcatcattacactccatcctgggcaataaaagcaaaactccatctcaaaaaaaaaaaaaaaaatcacagtcccagaggctggaagtcccagatcaaggtgtgggcagggctggttccctctcagggccctcagggaggatccgctctggtctctctccttggctcacaggtgaccatctcctctctccctcttcccttcctcttccctttggagctgtctcttttttttttttcatttttccttttttaattttagatttttcagacatggtctcactatgttgcccaggctggtctcaaactcttgaactcaagcaatcctcctgctttggcctcccagagtgctgcaatttcactgcccccagcctatttttttttttttgggggggggagatggagtttcactcttgtcacccaggctggagtgcaatggtgcgatcttggctcactgcaacctctgcctcccaggttcaaacaattctcctgcctcagcctcccaagtagctggactacaggcatccaccaccacaccgggttaattttttgtatctttagtagagacggggcttcaccatgttggccaggctagtctcacactcctgacctcgtgatccacctacctcagcctcccaaagtgctgggactgcaggcgtgagccaccacactcagtctacttggcctattttttatatttctttgagacagggtctccctctgacacctgggctggagtacagtggcgcaatcactgctcactgcagcctcaacctcccaggctcaagcagtcttcttgctcagcctcccaagtagctggggccacaggcatgcgccaccatgcccagctagcacgtctgtttctgtgcgcaaatctccccttttcataaggacaccagtcactggattagggcccaccctaatgacctcattttcacttcaggacctctgtaaacacccacctctaaatgaagtcacatgctgagggatgggggttcaggatcccaacctatccttgggggtggaggacacaatggaattcataatgctcccgaagtggttttcggcggggatcgtgaattaggtgtccagcgcgtaacacacagacaccatctggttctctgtgtgagaaggagggggttgcagcacacccgtcatgaataccagctctggagcaggacagacaggttcaaagcctggctccaccccgaccagctgcatgatcctggccaagtcacatcacttctctgtgactcagtttactccttgtaaaaaaaaaaaaaaaaaaaggataataacatcacctgcctggtacaactgtatacttactcattcagtaagtattttctaagcacctattactgggcactggaaatacagggtggacagcacagccgaggccccgtccgtgtggaccggacattccagtgcagctgagagccacttccactcgtgagagaatctacccgtgacagagctgcgtggaagctgacaggaggcccctctcaggaggtgacgcagaaactgggaccgggaaaatgaggcagggcccacgtgcggagacccagggaagggggatgcaggcagcaggcgcagcacgggtaaggcccaaaggcgggacagggagactccactcacagctgggcgcccaggagtgccgccagcttctggtgttttgttttggttttttttctttttttttttgagatgaagtctcactctgccacccaggctggagtgcagtggtgtgatcttggcccatggcccactgcaacctctaccgcctgggttcaggcgattctgctgcctcagcctcccgagtactgggattacaggtgcccgccaccgcaccctgctaatttttgcatttttagtagagacggggtttcaccatcttggtcaggctggtcttgaattcttcacctcgtgatccacccgcctctgcctcccaaagtgcagggattacaggtgtgagccaccgcgcccagcctgtttttttttttttctttttatgagagggaagctcactcagtggcccaggctggagtgcagtggcgcgatctcagctcacagcaacctccgccgccagggctcaaacgatcctcccacctcagccttccacatagctgaaccacaggcgcccgacaccacaagcagctacttttaaaattttttgtagaaatggggtttggctatgttgcttaggctggtctcgaatttctgagcttaggcaattcgcccacctcggcctcccaaagtgctgggattgcaggcgtgggccacagtgcctggcctgttgttttgtttatctgggaactgcctcaactttttttttttttttttttttttggacacagggtctcaccccgag[134 bp omitted]tacctaaaacaaaaaagtagccgggcatggtggcaggtgcctgtaatcccagctactcaggaggctgaggcaggagaattatttgaaaccaggagatggaggttgcagcctgaccaacaggaagaaaccccgtctctactaaaaatacaaaattagccgggcgtggtggcgcatgcctgtaatcccagctactcgggaggctgaggcaggagaatcacttgaacccaggaggtggaggatgccgtgagccaagatcccgtcattgcaccagcctgggcaacaagagcaaaactccgtcttaaaaaaaaaaaaaaaaaatccctcactgcagcctcaacctcccaggctcaagcaatcctcccacctccacctcccaagtagttgggactacaagtgcacaccatcacgcctgcctcattgttttttattttttttttgagatggagtctcactctgtcacccaggctggagtgcagtggcgccatctcggctcactgcaagctccacctcccgggttcacgccattctcctgcctcagcctcccaagtagctgggttacaggtgcccgccaccacgcccggctaatttttttgtgtttcttagtagacacggggtttcaccg[134 bp omitted]atgttgcccaggctgatctcaaactccctgataaacaaggctgtgggtacctgcttcctggggctctttgctttgtgttctttctagtcgggagctgggaagagccacagcttccagctttgtcagagtgtcatctcacaaactgatcttcccaaaacttctgtctcccaaagtgccgggatgacaggcgtgaaccgctgcacctggcctgccccagtgtggtagaatacacaccacataaaatggacgatcttcactatttttaaatccactgctgtctttattcctggctgttgatcttaggaaaacaccaagaagctggtacttgatttgctaaaaaagtca[175 bp omitted]ggtggcaggcgcctgtagtcccccgccactcgggaggctgaggcaggagaatggcatgaacccgggaggcggagcttggagtgagccgagatgtgccactgtcctccagcctgggcgacaaagcaagataccgtctcagaaaaaaaaaaaaacccctctagagaatcccagaaaatagaaggaattattccatttcccggaagaggaacgtgtggctaagagaggaggcatcacctgcccaggtgtgtccagccggggtcctcactgtctcagggacctcagtgctccggacacctgtgtccacaagccagagacaggatcagaggcgccctgggtgggattgcctgggacagtgtgcatgaaggtgacagtgctgtacctggtacacagcaggtgcttaataaatgttcatccacctctgagactctgaggcattgccctctcactgttctttgtgatctcaccgtagtgcctctcacctacccgacaacagtgccggctctttcttgatccccaagggcacagcaggggctcagtatgaatgaatgaatgaaccaacgaatgtgcacctgcacctgcctccctagggctgtgagtggcacaaggacagctctggttcatctcacacctccagcacctggtcaggtctgagatcacgtctgctaaataaatgaggtcccacaactcccccattccttgttcatttcctgagtacccgtttactgagcggggcacattgactctgaagaagaaagctttggccctttcagtgccagactagaaaagaaacaaagcagctgggcatggtggctcatgcctgtaatcccagcactttgggaggctg[132 bp omitted]agaatcgcttgaacccaggaggcggaggctgcagtgagccaagatcgcatcattgcactccagcctgggtgacagagcaagactccatctcaaaaaaaaggtcttgctctgtcatccaggttagagtgcagtggcacaaatacggctcactgcagccttgaactctcgggctcaagtgatcctcttgcctcagcctcctgagtagctgggactgtaggcacatgccaggatgcccggctaatttttttttttttttaatctttggtacacacaaggtctcactatgcttcctaggctggtctctaactcctgagctcaagcaatcctaagagaagagattttaaatgtggtcaccacaaaaacaggtaagtatttgaggtaatgcatatgttaattagcttgatttagccattctacaatgtatacaatgtacatcatgctgtacataatatatacaagtatacatgtcaactaaacaataaataattttagtgtattcttgagtctatttaaagatgaacaagaatagaaaagctagaggatggtcccagttttacataaaaatatataaatacacacacaaacctattataaacaagactagaaagatccataaaagtgattctcctggggctggtgcagatcaaagttgtttagttctgtcttcttttttattgagacagagtctcactctgtcacccaggctggagtgcactggcacaatctcagctcactgcaacctccgcctcctgggttcaagcaattctcctgcctcagcaccctgagtagctgagattacaggtgtgcaccaccacgcctggctaatttttgtatttttagtagagacagggtttcaccatgttggccaggctggtctcgaactcctgacctcaagggatccacctgcctcagcctcccaaagtgctgggattaacaggcgtgagccactgtgcccagccagttctgtcttctttacattgcagtattttataaatgtcccataacaaacacatatt[135 bp omitted]cctgagcaacatggtgaaaccccagctctaaaaacaaaacaaaacaataaaacaataattagctgtgtgtggtggcgtatgcctgtactcccagctacttgggaggctgaagtgggaggatcccttgagcccagcaggttgagactgcagtgagccatgactgcaccactgcactctagcctgggtgacagagatggatcctgtctcaaacaaactaattattcaggtagggcacggtggctcacacctgtaatcccagcactttgggaggccaagggaagcagatcacctgaggtcaggagttcgagaccagcctgaccaacatggtgaaaccctgtctctacctaaaacacaaaaaattagccaggcacggtggcgggtgcctgtaatcccagctactcaggaggctgaagcaggagaatcatttgaaatcgggagacggaggttgcagtgaggcaagatcacaccactgcactccagcctgggcaacagagcgagaccccatctgtctcaaaacaaacaaacaaaacaaagtcagccgggcgcagtggcccacgcctgtaatcccagcactctgggaggct[135 bp omitted]aggtccgcgcttgaacccaggaggcagaggttacagtgagccgagatcgcgccattgcactcagcctggccgacagagtgagactccctctcaaaataacagtagtaataaataaataaagtcgttgcttgcaggctgtacaaaaaaaggcagcaactggacttggcccctaactcatagtttgccaaaactctgctctaaagtttgcttgcttcattcacttctcagagcctggccctgggagccgcctatcccagtcctcatcccacatggccagcgttctcctaccttcaatgatctttgctgcaaactctcggatagacttgagggaagccaagtccaggtgccgggcgttgacatggtgattgagggtctccccgcggatgtcctttgctgccgcctcacacttctccatgtctcggcaggccaggatgatgttgcctcctgaaaacccaggatggaaaaagatttaaattaataatccactcctgggtactgaccccagagacatgaaaacatacgtctacacaaaaacacatccaccaatgttcactgcggcattcttcacaaaagccaaaaggtagaaacaaccaaatgcccatctgtggatgaagggacaacaaaatgtggtccatccatagagatggaatattagacggccgtgaaaaggagtgaagcactggctcatgctacagcaaggatgaccgtcagaaacactgtgctcggggaaagaaaccagacacgaaagaccacacagcgtacaatcccatttacatgaattctatgtatatgatttcacacctatgaaacgcccagaataggcaaatccatagagaaagaaaatagattcttggttttctagggcagggggtggggagagggaattacagcttgatagttacagtgagcaggtttctttctagggtaacagatgttctaagattgattttaaagatggttgcatcattctgtgactatactaaacatcactgaattggtcgggcacggtggctcacacctgtaattccagcactttgggaggccaaggcaagaggattccccatcctctccttttttttttttttttagatggagtctcactctgtcacccaggctggagtgcggtggcgcaatctcggctcactgcaacctccacctcctgggttcaagcaattctcctgcctcagcctcccgagtagctgggattacaggcacctaccacaactagctaattttttatttttttatttttagtagagacagcggtttcaccatgttagccaagctagtcttgaacttctgacctcaggtgatccaccccgcggcctcccaaagtactgggattacaaataagccacaatgcccagcctccaattttttttgttgtggtaaaatacaaatcacttaaaatttatcatcttaacccccttttctttttgtttattattatttttttttttttgagtcagtctcactctgctgccgcggctggagtgctggcgccatcacagctcattcagccttgaactcctaggctcaagtgacctgggactataggtaccacctgtgccagcatgcctggctaactctggtagagatgggggtgttgctatggtgtccaggctggtctggaacccctggcctcaagtgatcctcctgcctcagcctccaaaagtgctggaattatagatgtgagccaccgagacccgccctcttagccatttttaagtgtccagttcattggtattaaaaacatttatggctgggccgggcatggtggctcacacctgtaatcccagcactttgggagaccaaggcaggtggatcacctgaggtcaggagttcaagaccagcctggccaacacattacaaacttagctgggtgtggtgttgcatgcctgtaatcccagctactcgggtggctgaggcaggagaattgcttgaacccgggaggcgaaggttgcagtgagccaagatcatgccactgcactccagcctgggcgacaagagcaaaactccatctcaaaaaaaaaaaaacaataataataattcctaatgttgtgcaaccattacaaccatccatctctcaaattgtttcatcttgccaaactaaacttccgtttccattaaacagtaactccccattctcccctcccctcctgacccctggcaagcaccattccaacttctctatgaatttaactgtaggtagctcctgtaagtggaatcataccgtatttgctcttctgtcgactggcttatttcacttcatggaatgtcctcaaggttcatctgtttcaatgcccttttttttgttttgctttgttttgttttgtttttgagtctcactctgtcacccaggctggagtgccgtggcgccatctctgctcactgcaacccctgcctctcaggttcaagcgattctcctgcttcagcctcccaagcagctgggactacaggtgcccaccacaactcctggctaatttttgtatttttagtagagagggggtttcaccatgttggttaggctggtctcgaactcctgacctcgtgatccgccagctttggcctcccaaagtactgattacaggcgtgcaccaccgcgcccggccagaatgcccttcctttttaaggctgaatcatatgcccctgtctatagaagccacattctgtttccctgttcatctgtggatgggtgcctgggttccttccacctccggactgtgaataatgctgcagtgagcatggatgtacagatatctctctgagagccaaagcaggggagattttacctctcctggccagttccaaggcggtctgcttcccgatgcctgtgttggcacccgtcacgatgaccgtcttcccagggatggtggccttgctggggcaagccccaccggtgacatagtccctgagggtgagaagcggcacggtcagtcctgtgggcccactctcaccccacgtgcccctgactgaatgatctcaggcaaccttgtctgagctcactcacataccccaactgaaacacagacatcatcacatcacaccaagggacctctgtcatgttctccataagtggctccacccagtgtctggcgtgtggaacgccttcagcaagtgacagtcattattttataaatgctcactgcatgagattcccggccaggtgagggggcttgcacctgtaatcccagcactttgggaggccaaagttttgggggtgggggggggcgggggcggatcacttgaggtcaggagttcgagtccagcctggcaaacatggcgagaccccgtctctacttaaaatacaaaaattagccagatgtgtagggaaaagagagattagactgttactgtgtctatatagaaaggaaagacataagagactccattttgaaaaagacctgtactttgaacaattgctttgctgagatgttgttaatttgtagctttgacccagccactttgacccaatctggagctcacaaaaacctgtgttgtatgaaatcaaggtttaagggatctagggctgtgcaggaagtgccttgttaacacaatgtttccaagcagtatacttggtaaaagtcatcgccagtctctagtctcaataaaccaggggcacgatgcactgcagaaagctgcagggacctctgcccttgaacacagagtattgtccaaggtttctccccgtgggatagtctgaaatatggcctcgtgggatgagaaagacctgaccgtcccccagcccaacacccgtaaagggtctgtgctgaggtggattggtaaaagaggaaagcctcttgcagttgagagagaggaaggccactgtctcctgcctgaccctgggaactgaatgtctcggtataaaacctgattgtacatttgttcaattctgagacaggagaaaagccgccctatggcgggaggcgagacatgtttacagcaatgctgccttgttattctttactccgctgagatgtttgggtggagagaaacatcaatctggcctacgtgcacgtccaggcatagtaccttcccttgaacttaattatgtcatagattcttttgctcacatggtttttgctgacctcattatcaccctgctctcctactacattcctttttgctgaaataatgaagataataatcagtaaaaactgagggaactcagaggccggtgccggtgcaggtccttggtatgctgagcgccggtcccctgggcccactgttgtttctctatactttgtgtcttatttcttttctcagtctctcgtcccacccaactagaaatacccacaggtgtggaggggcaggccaccccttcacaggcgtggtggtgcacacctgtaatctcagctactcagggggctgaggcacgagaattgcttgaacctggaaggcggaggttgcagtgagtcgaaatggtgccagcctgggcaacagagcgagactctgtctcaaaaaaatttaaatttaaatttaaaatgcccgctgcacgagattcccaaggctgctgtacgcattaccacagacttagtggcttaaaaccacataagtgcatcctcctccagttcggcaggtcaagagtccaaaacatgtctcactggaataaatcaaggtattggtagagtcaggttccttctggaggctctagggaagaatccacttccagctcctacagaccgccacattcctccactcttggccccgcctccatcttcaacct[148 bp omitted]tgccttagcctcctgagtggctgggattacaggcacatgccaccacacctggctaatttcttttgtatttttagtagagacagagttttaccacgttggtcaggctggtctcgaactcctgaccttgtgatccgcctgccttggcctcccaaagtgctgcgattacaggcgtgagccaccacacccaacaacctctccttctatcttccatctcccctctgactgagcctcctgctccctcttataaggaccctataagactacaaggcaggaccggcacagtgcctcacacctgtaatcccagcactttgggaggccaagacaggaggatcacttgaggtcaggagttcgagaccagccatggccaacatgctgacaccccatctctactaaaaatacaaaaattagcagggcttggtggtgcacgcctgtagagtcagctactcgggaggctgaagtgggaggaccacctgagcccagggagggtgaggctgcagtgagctgtgacagcatgactgcactccagcctgggtgacagagagaccctgtctccaaaaaaaaaaaaagactacatgataatcataagatccttcacttggccgggcacggtggctcacgcctgtaaccccagcactttgggaggccaaggtggccagatcccctttggtcgggagctcaagaccagcctgaccaacatggagaaacctcgtctctactaaaaatacaaaattagacaggcgtggtggcacatgcctgtaatcccagctactcaggaggctgaggccggacaatcgcttgaacccgggaggtggaggttgtggtgagccgaggtcgtgccattgcactccagcctgggcaacaacagcgaaactctgtctcaaaaaaaaaaaagatgcttcacttaacacatcagcgagaacctctgacacgtgaggtaatgtcgtcacaccttccgaggattaggacgtggacccctctacggagtcacgactctgcccaccacacccatgtcccacagaggctaacgctggcaacaagatagtgtccagcaacaggaggctgagcaggtaaacagcactgcacccacaggagagaagggcaccatgcaatacagtggccaccagccacagaggctaatttttaagaaagtttaaattaagtaggctgggcgaggtggctcacgtctgtaatcccagcactttggaggccgaggcaggcggatcacctgagggcaggtgtttgagaccagcctggccaacatggcaaaaccccgtctctgcgaaaaatacaaaaattagccgggcgtggtggcgcacgtgtgatctcagctcctggggacgc[137 bp omitted]aaataaagagtttaaaagtctggaaggaaagcaacatttacaagggcccaggctcgcccttccctccgagtgaccttgggccggtgacctggccggccagagcgcaggtttgccccactccgggcgggcactgcgggtcgggagctacggggcctggacccgggtgcgaggggcgggggtctccgccgccttcccggcccctgcgctgggggcccgccttgaccgcgcacgcggggctagaatgtactcacttgagcagcacggcggcgcctgctaccgtgcccagcgccgacagcggcagcaggtagcggctcatgccgggccggggacaggcgtcaggcgtcaggggtcggcgcggagcttgctgcacaccagccgcctgggtagctccgaggaagagcgcgcgacgcagccacaggcgagcggaggcgcaggcgcggctgggcccgcgtccggaactgggctgcgaggggcggggcgcgggcggagggggcggggatcctagggacgggacctatgagcatcggtcctgagcgctgtcacagctgggattggtggtttcaggagcctgtgggcgtggctagtccgggggcggggcctatggtttgttcgaatgacgtcacacttgccgcagcgtataaggcgctacgcagttctggagtgaaataggttcgaatcccaccactgtcaattccagactgtgaccctctgtgtgtctttcaactatatcagcctattccctcatctggaaatgtgtgtttaccttcttcatagacttttggagataatttgagaatttccatgcacagaaacaaggatctagtagcctgtgggtacccaagctcctggggtcctgcaggagaaggcggctgggggcctggactcctgggtctgagggaggaggggctgggggcctggactcctgggtccaagggaggaggggctgggagcatggacttctgggtccgagggaggagggccgggtgcctggactgctgagtctgagggaggaggggctgggggcctgattcattcccaaattatcagaatctcatccccatgtctggccctgcacagagatatcttccctgaactctgcctgaactacctttcttagattgagtattgcacacactcctgcacttacctgtccatgtttgtcacccccaccaaaccgggatgcacctctgggcacctgcttccccttgcactgctcacagcgagtgtatctgatcaccacctcctacccctgactgtgcctgaggtgccaggagcagacaccgctggaaacagggaagaattcaacccaatctaactaggagtaagttttcttcctcatcagatgaactgtcatcttcttatatgagccctgccataatggag[142 bp omitted]gaaaccctgtctctactaaaaatacaaaaattagctggatgtggtggcactcacctgtagtcccagctactcaggaggccgaagcaggagcatcacttgaactcgggaggtggaggttgcagtgagccgagattgccctactgcattccagcctggcgacagagtgaaattctgtcaaaaaaaaaaaaaccttaggcctgtagaccttaagctctcaccatctcaaacgtattaaaccagttacacaatgccaaatgctgtataagaggcacttggaggagtcaaattcatagagacagaaaacagagtggtggctgcagggggctggagatgagattgggaagtcacaggatttgtttttgtttgtttgtttgttttgttttgttttttgagagacagtctcactgtgtcacccaggctggagagcagtgggcgatctcagctcactgcaacctctgcctcctaggttcaagcgattctcctgcctc[134 bp omitted]cggccacccaaagtgctgggattacaggcatgagccaccgcacccggccgggaagctgttttttaatagatacagagtttgttttgcaaaataaaaaaaagacctgaaggtggacggtggtgatggttgcacaacaatgtgaatatacttaacatcactgaattgtacacttaaaatggttaagatggtacattttactttatgcatagtttaccaaactaaaaataaagaaaaattttagactgggcatggtggctcatgcctgtaatcccagcactttgggaggccaaagtggagaatagtatgagcccaggagtttgagagcggcctggacaacacggcaaaaccttatctctacaaaaaatacaaaaattagcaggtttggtggcacgcatctgcaccctcagctacttgggaggctgaggtgggaggtctgcttgagcccaggaggtcaaggctatgatgagctgtgattgtgccactgcaccccaggctgggtgacagagcaagaccccatctcaaaaataataataataaatgtttacatttaataacatgggcaattggttcagatgttcattttctcaaccttgaaaaaaaaacaacactgtttttccctgtctttttctccttttctgtaaactgaaatcctaatatcattgacttccaggacagagatcagcaaactttttctacaaacagccagatagtaaataatttcagctttgtgatccacacagtggctgttgcacctcctctgccagaggagctgggaagcagccacagatgatgtgaaaacaagtgagcacagctgtgttcccataaaactttatttataaaaataagcagtgcgccacagttcgccagctcctgtttgagagtctctctccgatgcccaggctggagcgcagtgatgcaatctcagctcactgcaacctctgcctcctgggttcaagcgattctcctgcctc[134 bp omitted]cagcctcccaaagtgctgggattacaaagcgtgagccactgcgcccagctacctgtcattgaatttggaaggatggcatgaagtcattcataacaaggacttaatccatagtaagtgccagaacattgctggctgttaatatggttattataaagagaacaatgcatgcatattcctcctctgaggatctcctacctgattcccagacacacccaagggagttagaacatctgtttggactccaggtgggctgtccacgcctttaccattttcctggttgttaacatgttcctgatcagcactgggtgctgtcccaggtgctgagaggattctcccacaatgccctttgctttccccatcagagggtttatggcacccaattctcattcacattctgtctctcctttctcgttcttctctatctctcctctctctgtctccttttctcttcctctctccctctctgtcttctctccctctctctccctctctcttcctctctctcttcctctgtcctcttttctctctctctctccctctctctcacatctctctttcccttcctttctctttcctctctcttcctctctccctctccctccttctgtcttcctctatccctctcttcctcttttttcttcctctcttcttgtctctttctctcctctctctctccctctttctctttctctctctcttcctctcccttcctcttcctctctctccttctttcttcctctctctcttcttgtgtgtgtctctctctctctgttctctctctccctctccccccaactctctttccctacacacatcttaagaggcctcagcagtgtaaggtaagtttagcgaccctgtggctgtgtagagataagcaaaggggggcaaggagctccagtggtcccagactccagccatttgagtctttgcagcccaagcactgccccagcttcttgacagccccagccatcaccaaagggcacacagataagctgcctccaccaaggcctgtgcagatggtaggtttttgagtaaaatagatatgatccttgtctgaagccactgagttttagaataatttgttatatggccatagtaactggaatgattgctgtaggtttattttattttattcatccttgctgcatgcaacacatgcatggctcagtaactagaaggaaagaagagaagaagggagggagaggcagagggtggacaggagaggatggtaggaaggaaagacaggaaaggagggtgttggtggccttgcctgcaagctgagcagacaccacgcaaacaggtgacctcccagttaagatggaggggactcagggctcaggaggggcagaaggtccccgtgtcggagagctgggcaagctttctgcaggaaatgatggggatcacggccatgtgagccggcaagatttccctcagccagggaggagactccgggctgtgggaacagcttaagcagaaggcatgggacaggaatgcatatgagagatattgtgggaggagggagggctgcctgggctggcatgcagggtatgggagggggtggaagggctgaggcgggagccatcagtaaaaggacccagagcgcggctccaatgccatggtaggaagcttggcgttgactcagagggcgctgggtaccgctgaagagtgttgagccaaggagggtcatgtcacgggcagatacatgttttagaatttcttcttttctggctgagatgtagagtatggactggagagaagcacaggggacataggaaaggtagttctagaaagaggggctgtcccaccagggaaagtcaaccaactgttccccagtatccattcctcccttccagctcatggcactaaagccactgattgattagctgggtgctatcaatctctctctcatctctctctccctctttctctccccctcatctgtgtcttttctctctctcatctctctgtctccctctttctgtccccctcctccgtgtctcctctctctctcttctctgtctcatatctctctcattgctctctccctctttctctccccctcctgtgtctccttctctctctctctttctcccccatctctctttctctcccccttcctctctttctcctctcactcttcctgtttctctctttctctttcttcctctctttctccctgtctctctcttcctcttttcctttgtctctctctctccccccaactctctctccctacacacatcttgagagacctcagcagtgtaagataagtttagctactccacggcctggcacggtagctcacgcctttaatcccagcactttgagaggccaaggcaggcagatcactggagattaggggtttgaaaccagcctggccaacatggtgaaaccctgtctctactacaagtaccaaaaaattagctgggcatggtggcacgcgcctgtagtcccagctactcggaaggctgaggcaggagaatcgcttgagcctgggaggcggaagttgcagtgagccgagaccacacctctgcactccagcctgggtgacagag[175 bp omitted]ggtggcgggtgcctgtagtcccagctactcgggaggc[137 bp omitted]agggagggagggaagggaaaggaagggaaggaaggaaggaaggaaggaaggaaggaaggaaggaaggaaggaaggggaggggaggggaggggaagggagggaagaaaggcaggccctgatgttcagggagctgagagtgaagtcaccggctccaacccaggatccaaactcaagtctgtctggggtcctatccccgtcaccaccccccgccccgacccatcccccagagacctgggaaggagccaggctcctccggtttcaggaaagggctgcacaaaccaccccgccacgatccctcccagagaacaaacagctcccggccaccggcagtctccctcctcctcctgccaggctggttcccagacccaccctccctgtgtcataagcgcctctccccgcactctcaccagggctggctgttctcagaggaacgcccaggaaaaacctacccgaacccctttcagctgggaaggggacccgcctgggcttcctcaccgccgatgagacctccctcgtcgtacacttagagctgcctgtgttttccttccttccttaagcgggctgggaactctagacactcagggatgggccagcccattagagtaagcattcggccacctctaggctgctacggtcactgctgctgtcaccatcaacgtgactgtctcacacctcacttcctccggccagccacacccctgcagatttaacccgccagcctccctaaggtttcctctgcctgaaatcctctctgcattcctggctcattctcgaaattgaggtcaaagctcagatgccgcctccttccctgaccaccctacctgaagcagccgcacctgcctgctcctagtcacgccgttccttcacctgtttcgtttcctccacagggtttaccacaatctgaaagtcttattcatgcaggtgtctacttgtttatctccccaccacacctactaggatgacaatatcacaagggctggggtttcatctgtctcctcctcctctgtatctccagcacatgaaacatgcttggcacactgtaggtgcttaagtatttgctactacatcactttgggattttgcataggacactcccaatgcttagaatgtcaatctttgcttcattgtccttggcaaactcctattcatcctttgaaaccccatccatttatcccttaaccaggaaaggcttctgtgcctcatacaaccacccataaagctggattagggctttctctggggacacccttgccctgtgccacacttccattagcgcacatatcccccatgaattgtgcacaccagcagggtctagagtacggcacacattttgtctcaggagctacgtattgaataaataaattaattactttttttgagacaaggtcttgctctgtcacccaggctggagtgcagtggtgcaatcgtggctcactgtaccttgacctcccaggttcaagcaatcctcccacctcagcctcccaagcagctaggaccacagatgcaggccactatgcctggctaatttttaattttttttttggtagggatggaatctccctatgttgcccaggctggtttcaaactcctaggctcaagggatcctcctgcctctgcttcccaaagtactgggactataggtgtgagacgccacactcagcctcattatttaatatgtaagtagctatatctctctgagacccagccccatctaatttataacctccctccttctcaagaacatgcctcagctcccattgccagggaatctgacctttctccttgtcataggatttttttttttttttgagtcagaatctcagtcagtcacccagcctggagtgcatggcgcaatggctcgctgcaacctctgcctcccgggttcaagtgattctcctgcctcagtctccctagtagctgggactacaagcgcacgccaccacacccagctacttttgtagagatggggtttcaccatgttggctaagctggtctcgaactcctgatctcaagtgatggcctcccaaaatgctgggtaacaggtgtgaggcaccacatccggctgtcataggaatttgtcagcaaatcctacagactagaggatgtgtgttgggtggtgtgggggtggggataacggaggagatggggggtgagctcttcaagccccaggggagaattctgttccgttcctgggacatcccaggtgagagggaagaaaggccagccccccaagacagctatcccagactgggacagaggcaaaccctgaccacagagccctgtcactcacccaagaacaggtgccaatgacagaatagccaggccgaggggggagagaggtgcttcggtgatggatttccctggtgacttgccaagacagggctttactgcctccgccctggactggctgagtcagactgtgcaggggtggacactttgactggtatttgggaggcatttgctgtgggttacagagagggaggggcctcctttgcggccagagaaggaggaaagaggccctgggccctgggacttgggacttgggtggaggctcgggtttcggtctcacctgctgctccagaccatggcctggagggccgcctgcgccacccccaaagcaatgagatagcccctcctccctcagacccaggagtccaggcccccagcccctcctccctcagacccaagagtccagaccccagcccctcctccctcagacccaaaggcctcggacccataccaaatgcttctatgagatagttttctccccttgttcatgaagaaatgagcccaggcccagtcagatctgcatctgtgtcacagcccagggccactgtaaccttaggctactgacttccctctctgagcctctgttttctcctgtcaatggggcaaggggtctgctccttccctcaaaccccaactcaggtacagtcaagcacagaaaatacttgtggcatgaatgtgatgagaacacagaattgcagaagccaaagaaagagaagcgtaagggccctccttccacccctacctcccccacccgctgctacacgcaccaggaccacctgctgggtagccaggagctcacagtctagccccgctggccacccctgcagcccccatccttcactcaggcagttgcagggcccagaacacccctatcttctaggattgacactggctgtcaaactcatccttcaaggtgattcctggcctgccctcctcctccaggcagcctgtcctcctcctccaggcagcctgtcctgaccctcagcagcctctcctggccttggcagagcccctcgtgtcctcccttgcagcacgcatgggaagaaaggccatcgtcctcgccattgctaacaccagccttgcgtttcctctttgccaggtactgtattgacaactctctataacctgactttatcctcccaataagctgggtgtggtgggtggctcatgcctgtcatcccagcacttcgggaggataaggcaggagtatcacatgagcccaggagttggagaccagcctgggcaacataaggagactctactatatatatgtgtatatatatttatatatagtctgagatgggaggatcaccccagtaggtcgagactgcagtgagctgtgattatgacactgcattctagcctgggccacagaactagaccttgtctcaattaagaaaaaaaatggggataataggacccattccataggatgtggtgaggattatgcatacacacacacacacacacacacacacatttatgatgtactgagaagatataagcacacaataagtatctccaaaattatcaagtggcaaagccaggattcagacccacacctgcccgaggctctctgccatcagaccacactatatctctttctctctgttccttcatccccatcaatcgaaggcaaaaatgtgccttctctgatttccaggctcactcagcatagaccgtggaggcaacatatcttgaatgaagcaacaaagcagtaatgcacatgaatgcaccaaatgccaaaagctcgtttactcaacaagtatctctccaacactttctatgtgctagacccaattctgtgtgctgcagattaagtggaggactgatcacacaaaaatctttgcccttgtgaagcttgcatttttttttttttttttttgagatggagtcttgctctgtcacccaggctggagtgcagtggagcaatcttggctcactgcaatctccacctcccgggttcacgccattctcctgcctcagc[220 bp omitted]aggctggagtgcagtggcacgatcatctcggttcactgcaacctccacctcccaggttcaagtgactctcttgccttggtctcccaagaagctgggattacaggtgtgcaccaccaactctggctaatttttttttttttagtagaaatggggttttatcatgttggtgacatggtgtgatctcggctgactgcaacctccacctccggggttcaagcaattttcttgtctcagcctcccaagaagctgggattacaggtgtacaccaccacccccggctaattttcatattttcagtagagacgtgctttcaccatgttggccaggttggtctcgaactcccaacctcaagtgatcaatccgcctcagcctcccaaagtgctgggattacaggcatgtgccaccgtgcccagcctgtgaagcttgcattctaacggaggagacacagacaaaatgaaccaggaacacagtgggtaagaaggtgaaaagttctccacacaaaaatgaagtagggagagag[131 bp omitted]gctgtctctactaaaagtacaaaattagccgggcgtggtggcgcgcgcctgtagtcccagctactcaggaggctgaggcaggagaatcacttgaacctgggggggcggaggttgcggtgagccaagattgcgccactgcactccagcctgggcaacaagagtgaaactctgtctcaaaaaaaacaaaagaagtcgagtaagggatgccgccatttgaaacagggtggtcagccagtcctctgagaaggtgacattcaggcaaagatcaaaggaggcaagaaagtgaggcatgagggtatctggtagaagagcattccaggcagaggaaacagcaagtgcaaaggccctgaggcaggaccgggtctggatgttccaagagcagcaaggaggccagtgtgctgacacacagaaggaagagatgagatca[144 bp omitted]tctcctgcctcagc[208 bp omitted]ctctcttgcctaggctggagtgcagtggtgcaattatcggctcgccgcaacctctgcctcccgggttcaagtgattttcctgcctcagcctcctgagtagctgggattacaggcacccgccaccacacctggataatttttgtgtttttagtacagatggggtttcaccatgttggctgggctggtctcgaactcctgtcctcaggtgatctgcctgcctcggcctcccaaagtgctgggattagagatgtgagccactgtacccatgcaagtttcttaacccttctcttcctcattttctcatctgtgagacgaagacagcctcccacccagacacactcccctcacggggctctggggagaaatgatgtggaaagctttgctagtaacctctacagcatggagggagttctggaaaagtgatttcagaaaggtgtttatgcctggaaagcctgttcatttttgtgatgtccttggagctgggccaggcattatcgagctaaatcttagcttttgtcagaataggggggtcattgagggaaatttccaaaggaaggtggaacgggatgggtggggaggtaagggcatgagcagaggcagtgatcgtgggcaggaggtgtccatagaagacgggctgccactggccctggagacagaaggtcagccccgggttcaaatccctccttaaccaagtgctgaaatggacaagttgctcaacctctctggccttcagcttcctcatctgtcaagcaggaatcaaacctcgaacttcctcccgctgttagaatttcaagggagttttaaagacagagctttcaactctgacctgtgaacaagtgtgacatcaaatgtactgttcgttgctattattctgttgctacaaggcagacagttagtttcccagctcccctgcagtccccccagcccctcctagatctgtctgccagccccgccccggggtcactccagccaggctgtgccaggtgaatgctcaggtatgcggaggcggaggcggaggcaggacggccctgggagggagcaggaggaggggccggcagcctggaagggaaaggacagcggagagcagggcagagcctgagcaggcaggtaaggagatccgggtcaggagagaagggggccggggcttgaccaatgggtctgagggacggggggactggggtctggactccagggtctcagggaggacgggctgggggtctgaactcccgggtctgagggaggagggcctggggtcctggactcctaggtctgagggaggaggggctgagggcctggactcctgggtctgagggaggaggagatggggcctggactcctgggtctgagggaggagtggactggggtctggactcctgggtctgagggaggaggggactggggtctggactcctgggtctagggaagagggactggggcctggacttctgggtctgagggaggaggggctgggggcctggactcctgggcctgagggaggaggggctggggcctggatgcctgcattgagggaggaggctggggtaggaattagaggctcctactggccaggccttcacatgtttgctggctcccagggcacctccaggtgggcaggagctaccactcagcaccatgagcaccgccacagggtaagcgcccccggaccccaggtcccagccccagcacgcctcccgcctcccctcgcctcctcacccacacccgcttgcggcagcccagactgtttgcggcggcccagactctggcccaagccccgacactcaggaggaagccagagcctctctcctccctgcccagcctggggttaggggcccccactgcagagcagacaggcctgagctccagttcggccctcacactcagtgctgatgtaaccctggtcagaggacatcacctcctggagcctcagcccctcctctgtgacacagggacaatgttgaaaaattggagggatagtgcattacaggacttagctgaccacctcactgacagcaggtgctcaactcataggagtcgctattgcgattgttatgttgttagtaaatattaaccctttgctagaaaatcagggctgtttataatgaagactcaagtcccccagagtaagcagggagaaaaacaatgagagatgagtcaaaatacctgcatggtaggtagtgagctctctggcccagaggtaatcaaattgtggtgacatcagactggcaggagcaggatgaggaacaggagtttgggaaaaagggtttttcagttcccctgacgccacctgatcgctgagcttctgttatgtgcatgcaagtggggattcaagaattcttaggaaaggtaatcttaggaagaaattgaggacgggaggagacagagaaggatgtggttgggaagcacctggcccatgggagtgggaggggaagcagataattccctgtctacttcagataccactaatgctattataaccattcccatttattgagcaacttctgtgtgctaagccctggcagcatcttaagaatgataataacagttattgaggcttcaaaatacttcacctgcatcatctgactgaatttgcccaacagccctaccagatggttactacgttacagaaagaaaaactgaggcaggagagattaaatcctcttctgaaggtcttatggcaaggaggcagtagacagagggtttgaatcccggactatgccatggtagagatcacactcccctaccacccagcaccaccgcctgacctgacctgtctttttttttttttttttttttttgagatggagtctcactctgctgccaggctggagtgcagtggcacgatctggactcactgcaacctccgcctcccaggttcaagtgattctcctgcctcagcctcccacgtagctggcactacaggcgcccaccaccacacccagctaatttttgtatttttagtagagacagggtttcacca[139 bp omitted]gctcaataataataataataataataataataataataataataacccttccatcgctccccattaccttcgtcatgaagcccttgctgccctgcttggcatttccacaggatctgcccccagtcccacagtctctctcattcctcttttcttcaccagcccagaagctgccccaaagccaagcgccaagtctatctatggtgagcggggggcaagggagccccaggcccatagaactgggtctaaagaaacaggacctggcatccagggtcttggaggaggaggggctgggggtctggactcctgagtcagagggaagaggtgctgggggtctggactcctgggtcagagggaagaggggctggggggctggactcctaggtttgagggaggaggggctgggggcctggactcctgagtcagagggaagaggtgctgggggcctggactcctgggtcagagggaagaggggctggggggctggactcctgggtcagagggaagaggggctggggggctggactcctgggtcagagggaagaggggctggggggctggactcctgggtcagagggaagaggggctggggggctggactcctgggtcagagggaagaggggctggggggctggactcctgggtcagagggaagaggggctgggggtctggactcctgagtcagagggaagaggggctggggggctggactcctgggtcagagggaagaggggctgggggcctggactcctgggtcagagggaagaggggctgggggcctggactcctgggtcagagggaagaggggctgggggtctggactcctgggtcagagggaggaggggctggggggctggactcctgggtcagagggaagaggggctgggggcctggactcctgggtttgagggaggaggggctgggggcctggactcctgggtcagagggaagaggggctggggggctggactcctaggtttgagggaggaggggctgggggcctggactcctgggtctgatggaggaggggctgggcctggactcccaggctcattctctttctcccctggcagagcagaggaagcgttactccacagttgttatggctgatgtatcccagtacccagtcaatgtgagtctggggtctgtgttcccccaggacatcttctggggcaaaggtggcctcaggagatagggcttttgaaagcagctaggcccccaagcaggaagcatgtggaaagtcagtttgcccatccataaaatggacctccgttgcctcacctcagtcatggatatgaagccaggggcctcgggtccacttaatctgccagcctttcctccaggccagctgttgtgctggacagtgggaccacggaggcaaatcaagacacagccctgcatgaggaaggggtagacaaggtccagaggaatccacagaggcgcctggtgctctaatggaggtggcagggggcatggcaggagacccgaggaggcatttagaaggagagagctataatccagactccttccctgcccgcaaggagcctccagtctgtgagaagccagactcaggtgctagtcactctgatgaaagggaaacaaagggcactgggaggaggagctgatttgtggaacaggtgatcaaggaaggcttcctggaggaggtgtggttagtctcaggctgaaagtctgattattctgggggattctgagcccacctggcatcatcttgggcctcactgctttctccatggtccgtaccagcacctggtgacgttctgcctgggtgaggacgatggcgtgcataccgtggaggatgcctccaggaagttggccgtcatggatagccagggccgagtctgggcacaggagatgctgctgcgagtgtctcccgaccatgtcacgctgctcgacccggcctccaaggtgccggggggcacgtgggtgggaggagtgtctggggcagggacttcagggggtctgggtgtgaatcttggctcctgcacgtccttcctctgggaactctggcgagggaccccagcccccttcttgagccttaatagcctcatctattaaacagggctgttatccctaaccccctaaccgcctgaggttgccctgacctgctggcccacactcccgtcgccatttagtagtaccatcatttcggggcctcagtttaccccgccatcccacccggcaggaggagctggagtcgtacccactgggcgccatcgtgcgctgtgacgcggtgatgccacccggcaggagccgctcgttgctgctgctcgtgtgccaggaacccgagcgcgcgcagcccgacgtgcacttcttccagggcctgcgcctcggggtgagcagatgggctggctctgggggtggagctggaactgggcggagcctggagccggggcggaaatgggtggggcctctaggtggggcggggcctggggctaaggcgggatcagagcaaggaagggcaggggacctgggaaggaagttctggaaggcagtggggtttgagattggacccagggtcaagatagaacatgaaggtgggatgaggacatgaacagaacatggccaagaaggatctgggggagcagccaggacgaggtgggggcgaggaaccacccggactgggtctccatgggcggggtcgtggcttagggcagggacaggtgtagggcgaggggtgagttcggggcgtggacgtgcgtgggttcacaggtgtgaacggtagccgcacgtgggctgggactgagctgaaaaatcggccaggggcgaggcccgggtaggaagtgggtgcggcgtggggaggcgtggcctgacggtgtgattggcaggcggagctgatccgagaggacatccagggggctctgcacaattaccgctcgggccgcggggagcgcagggcggcggcgctcaggtgagagggaagaagttggcagggtctctgggaagccggtttcccctccttgtgcctcagtctacaacaccagcctggaacagaacaagagttttgcatggagtcaagcacaccctagtcgagtcttgtctgtacctcccagacgagctgaccccttctccagaactctgcttcttttctctgttccctgtccaggccctcagtttcactctagagaggtgctatccctccgtatatcggatttctccctacctcgttgaacttgttcactccctttgagccttttgagcctgtgtgtctcgttctgcgccctggatttccccctccctggacccctcagtggacccagtcttggtgtccccgtcgccctccgcagggccacgcaggaggagttgcagcgcgaccgctcgcccgccgctgagaccccgcccctgcagcgccgcccgtcagtccgcgcagtgatcagcaccgtagagcggggcgcgggccgcggacgaccccaggcgaagcccattcccgaggcagaggaggcgcagaggcctgagccggtggggacctcgagcaacgctgactcggcctccccggacctgggtccccggggtcctgacctggcggttctgcaggcggagcgggaagtggtgagccgctaaggaaggggtctgggggcagggccaggcgactggaggcggggctagggcgtggaagggcggggccggctgcgggacgggcgttctctggtcagacttctgcgttatggaagaggggctgggtcgggggcggggcttggttgtggggcgtggccaggtgtttggggcgtggcctgatctggggaagtgtataggtgctcaggttcagggcttcgacggggatggttttggaactcgggagccctgagcgtccccctcctctgtcccctaggacatcctgaaccacgtgttcgacgacgtagagagctttgtatcgaggctgcagaagtcggcggaggcggccagggtgctggagcaccgggaacgcggccgcaggagccggcgccgggcggctgggggtaaggggcaccctggcgtgggatctgaaccccctcccgatctcttccaaatgtccccgctctccccaggctctcccctcccgccacttgccagggctgacctcaccgccatcttaaccgggtgtccacctctctctgcctgcctggtgctggccccgcgtccccatcgccgcgcccgtctgctcccctcagagggcttgctgacgctgcgggccaagccgccctcggaggccgagtacaccgacgtgctgcagaagatcaagtacgccttcagcctgctggtgaggacgcgcccgcccctgggccggggcgcgggcacgacgaacctgtcccgtccccgcacccacgccaaccacctccctccccacgccccaggcccggctgcgcggcaacatcgccgacccctcctctccggagctgttgcacttccttttcgggcctctgcagatggtgagacccgccccaggccctcgggcccccctgcagcgggaggaatcgggttcgacttgtagaaggtgtggcggcacagcctgcccctcctgctcccctgacagattgtgaacacgtcgggggggccggagttcgcgagcagtgtgcggcggccgcatctgacatcggatgccgtggcgctgctgcgggacaacgtcactccacgtgaaaacgagctctggacctcgctgggggactcgtggacccgccccgggtgaggggcggggctgggaggcagggggcatggtgattggaggagcataaggcgctgggaggtgggtggcatgatgattggaaaataggactaggagagtagggaggggttagaggcgtggcttagttgtgttggggcggggcttaggacagatgccaagattcaattggaggaaaggccaggaattaacgtgaaggaaagatttaagaccaccagaccaatcggattgaaagaaaaggggggcttaaaggaatagaggggctaggggctacggggcaggggcggggctacgcgaaggggcggggcttctggaaggtttggtctataactttggtgatgggacagagtctgtgcactgcgggctggcagttccgcagggaaagggtcagaacctgaaaccgaccttacggaaaacctgatttggaatcaggtgagatttagaggctggataaggcaatttttttccagagagagagatggatggggtctcaatattttgcccaggctggtctggaactcctggcctcaagcgatcctcccatcttggcctcccaaaatgctgggattacaggcgtgagccaccgtgcccggtctagaaatataaattgctgttgagttgggcttagagctaccggcaggacttggtgaaaagtggcggggctagaatcgttggaatacagcgagctttaggggaaaacttagtgaagttaatgcaggaacgaagttgggggctgtatcaggatccctgagctcttggccctgtccctggccgcaggctggagctgtccccggaggagggacccccatacagacccgagttcttcagcggctgggagccgccggtcactgacccgcagagccgcgcctgggaggacccagttgagaaacagctacagcacgagcggaggcgccggcaggtgacccaagcgacacagcagggccgaggctgggaagtccgggggcgcggccggtccgcctggccccgcctgacccgactgtcttacttcctacagcaaagcgccccccaggtcgctgtcaatgggtgagtgtccgccccagggcagggcaagggggtcaaggaggggtgcgtcccgggggctcccgatgctgactccgccccctttttttctgtgtttttccttctgtcttcctggctcttctcaggtgggtgagatggtgatggggcgggccggggctgggagagagggaggagcagggtgggagggggcgggacccagacttctggggctaagggagttgggaatggagacccggattcctgggcctaagggaggaagggggctgggagtgggtaaagtctgagaggttggatccctggatccccaaaaggctggaagaagccagtttgttttcccagggcctgggaagcaccatgcctgggctccctaggaggacagagccctggatattggaggggagaggctggggaattggacctttgggttttgaagaagagcccaagtctggtgcttgggatcctggagacccagaggagcaggcttgggacttcaagggcttgggggcaagtttctgggaaagttaggaagtggtagtatctctgggcccccgagaggggtaaaggctggacgattaaactcttggttttccagaggctctaatgcaattgtctaagtcgctgctgggtgtcggactgggttaaaaggtttgagggttaaaaggataagattgaagcttgagacctggactcctaggtccctgggggaggaaagaacattccaagtcatggttctaccaagcagtgggggctcagactctgggtcctgggggagggaaggaggtagatggactagaactctagggtccttgagcaaatagagggcagactggagggaagcaacgtgggaggagacgaaaacaaagcagtgaggctggaggagacaaaggggggtctgggtgagggcccgagcagagggtctcagcagggacagcgtgctgggagctgccggccccacacagggggtgccgcggccctgaagaccccccctctcccctgcacaggtaggcctgatccaggctgaggtccctcttattgggggtcagagctgaaatcccacccctgcccccagctgcctgatatcgcaaccctggtccctgttcacagcttcaagtcactttctccgagcctcaagttcttttttgcagggaaactgggaataatgattatccgttcccggaacagtgagaagtctgtggtgttgtaggaactagcagttaagggcttaaggctgtgaccaggttcaagttcaagtccagctgcctgcaaactaaggcagcattattcagacctgggctaccctggtcccgggctggcgatgccactctcttactctgtgacctttacatccctgtgcctcagcttcctcctctgtgaaaatggaggagatcatagggtctctgggggaggaagaaactgggggagagaggggagtccaaattcatggttctaccaaccgttgtcataaagatcaaattaactaatatacgtaacagaacagtgcccagcacacagtaagtggtacagaagtggtagctattgttttttgagacagtctcactctgtcatcaggctggagtgcagtggtgagatctcagctcactgcaacttctgcctgccaggttcaagcaattctcctgcctcagcctccagaatagctgggactacaggcgcgtgccaccacgcccagctaatttgggtattttttagtagagacagggtttcaccatgttggccaggatggtcttgatctcttgacctcatgatctgcccgcctcagcctcccaaagcgctgggattacaggcgtgagccaccgcgcccggcctagctagtgtttttattatgcttatgagttatgatatataaagcccagtgcctattagatgctcaataaatgacagctgtttctagctgtgtgatgtgggcaagtcattttctcgctctgagcctcattctcctctgtaaaatggaatcgatggtgggatagtacccactacatatgcctacagcacaatgccaagcaacggagggagcaaatatattcagtctgttattcttgtttcaaatttctattaacagtattaacccggcccctgctgtgcccccagcttggctctaaccccagctcacaccagcaccctgcagcccagagcaatggggctggctgcctccttatctccaaccctcccgcttctcctcagtcaccgagacttggagccagaatctgagcctcagctggagtcagagacagcaggaaaatgggtcctgtgtaattatgacttccaggcccgcaacagcagtgagctgtcggtcaagcagcgggacgtactggaggttagaggagcgggaggctgaggggcaggaattagccagccctagctgcagacaggctctgaaccctctgttctttaccacacccaggtcctggatgacagtcgtaagtggtggaaggttcgggacccagcggggcaggagggatatgtgccctacaacatcctgacaccctaccccggaccccggctgcaccacagccaaagccctgcccgcagcctggtgagccagcgcagacgctgggatcttgagggtggagaggctgggaccagatcctgggaacaaggggcgtggggatcagctgtcaagagtgctggagcaggtggtgactgggggttcagaaatgcatctccagaaaggggagaggctgggactctgagtcctctccctaacccaggtactctcctctccttcctttcagaacagcactcctcctccaccaccagccccagccccggccccacctccagctctggctcggccccgctgggacaggccccgctgggacagctgcgatagcctcaacggcttggaccccagcgagaagggtgagtggtggggacgccggctgcggggagcggtccttatccttgctttccaggcagagaaacgggggctcagaaagagcaaagggactcccgtcccattctggggacgctggagcgcccccccgccccgccctctggccccaggacccctcgccctgagcccgcactccctacctcccggtttcccgcctgcagagaaattctcccagatgctcatcgtcaacgaggaactgcaggcgcgcctggcccagggccgctcgggaccgagccgcgcagtcccagggccccgcgccccggaaccgcagctcagcccgggctcggacgcctccgaggtccgcgcctggctgcaggccaagggctttagctccgggtgagtggggccggggccctctcggcgcgggttgatacggacgctgggagcggagcgttccgatcggccgggagtcggggggcggcagtcgtggagaccacagggagccgggattagcccgaagtgagggtctgtctggtagcaacacccaatggcaggctgtgattgccatgttttttcagactccgactggattccttagggaaatcccgtaccctttgaaagcaggatgcggccacgccccccgggtggcaacattgtgattggtgggtggggttcaggaggtgtcgggcctgcccccgctagagctagaatgctgttctgattggaccatcgccgggtgggcgtgacatgattgtccgggctggggcatccgccgaccggcctgaccgcgcccgggctgccctcgctcaggaccgtggacgcgctgggtgtgctgaccggggcgcagcttttctcgctgcagaaggaggagctgcgggcggtgagccccgaggagggggcacgtgtgtacagccaggtcaccgtgcagcgctcgctgctggaggtgagccggaccgctggtccctgggtctgggtagggttgggatgacgagggctcggacgccaggacaaagcgatttccaccccgccctccaggacaaagagaaagtgtcagagctggaggcagtgatggagaagcaaaagaagaaggtggaaggcgaggtggaaatggaggtcatttgacctgccaggcgcccttcgcaaagagtgacgaggccccgtgggagaacggactcctcagactctccccaatagcggaagtcgatcttctgaaggatggccaatctgctccggccctggtcttcccccatcccggtggacagacttaacgatccttgctgcagtccctccggagaggatctggactggctgggagtggggagggcgtggagacagtctacggaaagcgctagcagacccccgagagggtgcagtggagccctgagcattgtaatatgcggcccagcctataaacagcctccgtgcttagcagatggtgtgccaactgctgtcctctacccggctaccagggggctcagaaacctgcccctcgacccagtcacagcctcatggaacctggaaaatgttccaccctctttggtttctctctgaaccctcctttccatccccagggtcccaaaccaggctccctcctgacctcctagccagcctagtccagcttgccccaccttcacgtttccctggctcgcggctgctgggcatgaggctttgtgtctcccttcccgcctcaccaacgttctcacttcattccttcctgcgtcctggccctgcccttctccaaacgctcccaagcgttcaacctctgaggtttgcacctgctgtctctgctggctgaaacggccattccctgcctggcgaactcctgttcagcctccctggcccagctcaaacactcactgtggggaagcctgccctcatccccgaagctagtttcccagcatccacttctccattttgtcccccacctcctgccacggccctaccaggtagaactggctgcctcccaagcatgccacagctttctggccactctttgttctgggagatggcagccaactgaaaacttcctaatccctcaagaactagctccttctccctctggcaagccctgtaactttcttttccccattatccaggtggctggtaaggtctgcttttctctggatcccactgttttccagactggatattctctgcctttgggaagaatggccctttctctttctcccctggctctgccttccccagattactgagggcctctgggcctctgggcctcaagcctctcccggagttgttccaacctgggccaccagatggcgccctccaagatgggaaaggatcagagagacgcccccccacccccaccccgccccccgcccttggggcaggcaggagttctcagtccccactttgccacctcctgcctggttccttctggttccttccttcctctttggatctccaagagtccttctcctatctgccccgtccctagatcctattcacatacttcccttggctccctatggctcaccggataaaaccaggccccagcttggcagtcacaggttgcccactcggctcaccagcttctccgaccacggggctcagcttccctcctcctgctgccaagcttggttcatgtggttgcttctgcccagaatactctcagcccctctaccacttgcccggggccccacccctcattcttagtaggggaataggaaaggtaggcaattcccccaaacctctttgctccattcccgcacccgccccccgccccccaataagcccccgtggctctcgccacctaggctgcaaactgaaatgcctgcaggaacccgacaagagacccaagtgagccagccgggcctcagccctacccccgtcacaggccagcttgtttgaacatcctggcagctgtatcttccaatattctcagaacctgaccatctctcaccatcttcactcccatcaccccagccagagccaccctctctcttgcttggatttcaccagtagacccttagctggtccccccaatcctcaccaccaacccccagcctgttctccatgccagagggacctgttaaaacctaagtcaggccatggccatgctccaaaagacacccagagctccaatctcacagctcaagcccttcccagggccaagtctccacacagccaccgtgacctctctagcttcattccctgctttctccagctcctcagcttcctgcagcacaccaggtgccctaccccagggcctccacacacacagctcccatcatccctcaaatacctacacagctccctccccagggtctccacacacagagctcccatcatccagagcacccttccctcaaatacctacacagctccctctccaccaccttcaaccatctgcctgcaccagcttttccctgaggcctgcctagaccactctattcaaaacacatgtgcacacacgtgcacccaccttcccaacccctttcttttctccagagcgccgccaccttgaaatacatttattttaacatcggatgcccccctcctaaaagtattggatctttgttttgttcagtaatgatcagtcacactgtactcactcagtcctgttcttcctgttggtgttatactaattgttgaatgaatgcctcatctcagaagatggctcctactcagctctagtcaacggtggctatgcaggactgaaaagttcatattgtcacagattcctgttctttcaaaagaaggcaaaattctttttgttttttgtttgtttgtttgtttttgagatggagtctcgctctgctgcccaggctggagtgcagtgactcgatcttggctcactgcaacctctgcctcccaggttcaagcgattctcctgcctcagcctcccaagtagagtagatgcgattacaggcacctaccaccacgcctgctaatttttgcatttttagtaaagaaggggt[146 bp omitted]aatgttggcaattgactaaatttgtttcaaagacactgatggcaaaacccaaactccccagctccacatccttggccccagaggtcttgcccgctgatccctcctgccccatcagcttcccctcagccccccgcctgcgatcacgcgggctccgtcttggagccttcgctcccgctgggggctcatcctgaagctccttcaccacacaggtgagtaagcaccagcccatcccccggcacccacccaagtggcccagtggtttggtcatggacacgcacggccccccagcaggagcaggaaacagtgccctccctctggctgggaacacagagcttgagtggcaacttcacgacttttatttgtggtgcctgtgctttatctcgaaaataccttctccccctgccccagacagtgggcggggagggggcagcaaaaaatagaagacgtccctccctattgcacatggaccctatatacaggcccacctggctgaggctggcgggactcttggcacattcttggatccctgctcaggaggggaggggtgacggggtggcatcacacgtgagatggggacctccaggcggccactctggtcctggctactgatccttgcacttcttggtcctcagttccttcctggtcccgtctctggccctggtcccctctggcaacgtccccctgcttggctcggcctcccacctccatcctggcctcgggtggccccctcggctcctggggactctgctcccctcccagtccggaggtcccaggggggctatggcttctctgagacttcccccggagccctgtcactcgtgttcacacgggggaaggggtgcgtgtggcagaagcagctgtataaatacgggtgcgggaaagtccctccgggtcacttggagagtttgctgatgacgcggatcaacgctgcattctcatccttgaggcgctggttgtcagcgcggaggtcagacagggcctgggggacggcaagggtcagctgggcagccctggcgggttgcacccccacccaccctcggccctctgcccacagcccccacagcccccaccttcagctcctcctccagctctgcggccttgcgttccagggccctgcgctcctggaatgaacagggaaagtgcagaaactgagtgaggctgaggagggcaggggaaggccaggggccagctgggaagggcaatgtggctcccttggtccaaacttagggatgtgaggctggggacgcctctggcccccatccccactgcccctactcacgaatctctccagttccaggagggctggcctctcagcgaagcgttcttgcctctggtgaggacacagaaagcacaggggtcagcagaagaagccagcactgctctgaagggtcctaggctcctgctgggcacccgcccgcccactaggcagcccacaagcccttcccccacgggccaggccccgccaccggcaggcccacagccccatcccctcgctcagactccgcctccgagatctcggccccgcccctcaagtgaagcccagccccgccggcacccccaggccaggctctacctcccagcagtctaagccccacccaggcggccctgccagttcccgtgaccctggcctcggcgcccttacctgcgtggcccgctccagctccaccttgagctgcgccagccgcagcgtggtctcggtcagggcctcgcgaagccgctcgttctccctgcgcagctctgcatacagctgggggtcaggtagaggagggtcaggtggaggatggggcgatgctgggggggcggggaagccaggaagctgggcacccagcaggcaaagccccgacggaggggtgggatcgcaccgtcctaaagcctccgtctggctcttccgattctggctcaggttctgggttgaggtcccgctgccaccgctgcctgcgggccgaggggccgccctccagggtgctggggcaggggaggagcgcgcgtcaggggccggcccggcccgcacgcagaccccacctctcccaccccgcccctacctggactcctggctgcggtcagccggctccgcctcctccccctgtgggcaggtagacgggggttcaatgggtatgggagggactttagcgggtatgggaagggctttgcccgccccccggcccaccctctgcaccagctcggccccacctgagcccctcacctccgcaggccccctccactcctttccgaccttgcggtgctccctggccgcctgcggtcccggaccctgcccgtcgggcgcctctgctgggggaggggcaggaatcagcccaggcacctccagagccccctctcggtgcctgggtccccgggtcaagcccccaggaaagcaagaagactatgggagaaactggatgattccctgggaatgacctccccgagagcagacctcacctctctgggcagggctgtcagagttctccactccagggacgcggggccttcgggaagggtcctgtcgggagggggaggcgagtcagggaagcaggacatcccgcaccaccccactcgccctcgctgacccctctcaccaggctctgcgccggcttctctgactctggggccttccctgcagccttctctgcctccttcaggtctgtaagagtcacaccctggcagggaaaggggacagtcaggggacgctggggtcagggcccagcccctcctccctcagacccaggagcccaggccccagcccctcctccctcagacccaggagcccagaccccagcccctcctccctcagacccaggagtccagacctccagcccctcctccctcagacccaggagtccaggccccagcccctcctccctcagacccaggagtccagacctccagcccctcctccctcagacccaggagtccaggccccagcccctcctccctcagacccaggagtccagacctccagcccctcctccctcagacccaggagcccaggccccagcccctcctccctcagacccaggagtccagacctccagcccctcctccctcagacccaggagcccagaccccagcccctcctccctcagacccaggagcccaggccccagcccctcctccctcagacccaggagcccagaccccagcccctcctccctcagacccaggagcccaggccccagcccctcctccctcagacccaggagcccagaccccagcccctcctccctcagacccaggagtccaggccccagcccctcctccctcagacccaggagtccagacctccagcccctcctccctcagacccaggagcccagaccccagcccctcctccctcagacccaggagtccaggccccagcccctcctccctcagacccaggagcccaggccccagcccctcctccctcagacccaggagtccaggccccagcccctcctccctcagacccaggagtccagacctccagcccctcctccctcagacccaggagtccaggccccagcccctcctccctcagacccaggagcccaggccccagcccctcctccctcagacccaggagtccaggccccagcccctcctccctcagacccaggagtccagacctccagcccctcctccctcagacccaggagtccaggccccagcccctcctccctcagacccaggaatccaggcccccagcccctcctccctcagacccaggagtccaggccccagcccctcctccctcagacccaggagtccagaccccagcccaccccacacctgtgtggacctccgagactggcgcatgagacgggagcgagcttttctctgggattccgactcctcatcccgcacaggcatctggtaggacctgagggaagggtcccaacctcagacagggaacctggggaccctgtcccattccgtggctgacaccctccgcgggaagcaagttctgtgggaggggactccaactcccagcagacctgaggccagctctccctcaggagcccacccaaagccccgggactcctgcttcacatcgtctctccctgctgggggcgggggcggcagcttcctgccctggcctcttcacctccgtcggtcccgggagtccgctgggggcgccgtggaggctgtggggacgtttggcttcgctggggattcaggctccggaatcctggagggaggcgaggagttctccaagcaaggaggaggcttggtgacctcagacctgcatcaattcattcattccacaaacattacccaggtgcattgtgtgccggcactggagatgcagccgtgagtgaaagaaacaaattatctgggccacaacagagtcagagctgagcagaaatacacaaaacccacaaaagccatgaaaagaccagcacactacgcaaccggtcagaaggataaaggactctggacagaagcagcagtgcgagaactgagagcgggagggtgtgcgtgtgcggacggcgccgtggtggcagcagggtggtcagtgtgcacctcggggtggggggaagataggggagaaggtgacgtttcaacacagacctgagggagggagagagcccccaagaggaacacagcacaggctctggagtggcggcaggaaccagaccccagggggtacatggtctcactcaggatcacacggacaggcttggaacccacatctgccacccacccctgaggggcccaggccctggggactcacaggacagagggctccggcagcttcggggagggggtcggggtaattctggcaagacggagctccttggcctgtgtggagaggagaaggggaggaaggggcagttccctcgactgggcaggggcctgggcctggacccggcccaaccctcactcacctgagtggaggtcccttccagccaggaggaggaagccgagcgctgcagcccagccccaggggctccctccgctgtccgcctttcagggggacccagggcaccagaactccctgtcttcaggaggccaaagcgcctggagaagggggcctcttcaagctgctgggagaaggaggaggtctcagttagagagaaaggatccctcttctcagacctcaagggttagcccccaaaggactgcaacaaactacaattcccatcagcccccggggcaggcacagcctaaaaaggaagccggttgtccaggacgactctgggaactatagtcttccccctatctgcccctgccagaggttcacaggctgtatggaatcccacctccgggccctcccagcctcacaggacctctcagggcatccactcaccacgggactcttagggctggggtgcggcggggaggagacgccattgagggttctgggttctgcagggggtggttctgtgatgtgggaacaccgggcaggtcacagaagatgccagttgcctctagattcagagaacccgacccctcctccctcggacccaggagtccagattcaggcccctcaccggtgggaccttcttccccctcatcctcgtcctggatggggggccccccagccccaccaggccggcgctccttggacaagtcctggagggaaatcttctcgcgactgctcagacgacacacagagctcctgttggggaaggagagggtgctggggtacaagcccggggcctccagccaccccgccagccctggactcctccctccctataccttctgtgtttgctgctagagggcgcttggggctcctggccccggctctgggaagcttctttttggttccgaagctgcaaggagggaagggggctgcaggggaggggtggagcacacgtgccccacagcaacaccaccacaaacagctgtgcaggagctcactgcccaggcgggcaccgagggctcgtgggcttactggttttcctacagatggccacacacctcaggggcaggaggtgccctgcgtccagcaggcgcccgcagctgccacgtgcaggcactgccgtcttgtcctcacggcccccacccatgagaagcctccagtctcatccccagaggggtccttctagctcccaggggagacctgcttagacctcaccccgacccctcagcatacccagggcactggtgggccctcagctgccccggctcctgcagccggcactcgcctcctccttccccgcgcagttcaccaccgtcttcacaccttccccgcagttcaccaccgtcttcgccccttccccgcgcagttcaccaccgtcttcaccccttccccgcgcagttcaccaccgtcttcgccccttccccgcgcagttcaccaccgtcttcgccccttccccgcagttcaccaccgtcttcgccccttccccgcagttcaccaccgtcttcgccccttccctgcagttcaccactgtcttcgccccttccccgcgcagttcaccaccgtcttcgccccttccccgcgcagttcaccaccgtcttcgccccttctccgcgcagttcaccaccgtcttcaccccttccccgcagttcaccaccgtcttcacccctaccccgcgcagttcgcagttcaccaccgtcttcaccccttccccacgcagttcaccaccgtcttcaccccttccctgcagttcaccaccgtcttcaccccttctccgcgcagttcaccaccgtcttcacaccttccccgcgcagttcaccaccgtcttcacccctaccccgcgcagttcgcagttcaccaccgtcttcaccccttccccacgcagttcaccaccgtcttcaccccttccctgcagttcaccaccgtcttcgccccttccccgcagttcaccgtcttcaccccttccctgcagttcaccaccgtcttcaccccttccccgcagttcaccaccgtcttcgccccttctccgcgcagttcaccaccgtcttcacaccttccccgcgcagttcaccaccgtcttcacccctaccccgcacagttcgcagttcaccaccgtcttcgccccttccccacgcagttcaccaccgtcttcaccccttccccgcgcagttcaccaccgtcttcgccccttccccgcgcagttcaccaccgtcttcaccccttccccgcagttcaccaccgtcttcgccccttccccgcgcagttcaccaccgtcttcacacctttgtactgggagggcccttcattcctgcccttctagcaaactcttagtgctgtagtactcacgtcttccagaaagtgtccccagatgctcccaggctggtctccccccatatctgggccccctgagctgaccctgccccacctattaaacccctcatggccgtatcaccctcaggatggaagccaccatgctcctcgcctggcactcgtggccctcccgggtctgccctgccttacgctcccctccctgggcacctcagggcacccacacttgccccccagcctgtgtgagatcttctcctacatccatcagcctccacttcgctcctgccaacctttcaaaagaggaagctgtctccgctcccctgcccacgcaccagaagccctaggcctggccttgggagcttcctgtcacctcacagagctcactgaacgctggcatggctctagtgctttccaggggcacgtactcccccgagctcctgacagcacaatccacgtgtcacgcatgacccctcatacagttgcgcaccataccattcccatttgacagataaggaaactgaggcccggaaaggaaagtggctggctgagactcacggcagatccatggcagagccgggattccaacccaggcagtctggccaaggctcacgcccttcactccttcactctaagttttcccagcaaggctgccccggggatggctgggggacaccttgtgggtgaccagcccagcctgagtctaggacaatcctgcacatggctgctgccaagggccaccctgaggtgatgaggtgtgctaagcaacctcatcagggtgtcagacaaccctgtccaaatccttctgccgcccccaccaccaggcaggcaggaagctctgcagccccatctctgtcctgccccggctgggggtctctcctgaggctggggctggggctgggtcaccaagagggaaatagcaggtcgctggggtggtgggtgtcagaagtcgggggggttccccctctgcaccctcctctgaggagctgaggggacatggggagtctggggtaagcccctcagccctgacactcacgtcctcctgtttccgggccagttcctccaacaggctcagtacttcctcatcggccaggtcacagggacgctgcccctgggtcaggggaggagcaggatcagacaatgaaggaggtgctgggccctccccacgccctgcccctcaccagcctgggcactggccctcaccgcatgggtcagtgagtccatgcccccgccatgctcggccagcaggcggcaggcatcctccacgccccagtgtgccgctgcgtgcaggggagtccagccgtccccgtcccggagctctgggtcgtagccagcctgaaggagcaacctgggggccagggaggctcagggtcagaggccaaggcggggcccttggccgagggctgatttcggccagcggtttggtaacgaggtcccaggccacgagactgaaacgtccctggacaggctggtaaagagccactgcccagcatccgctgccacaagaggcccctctgcaccaggccttgtccctccccttggaccagcagttacatgttaaaccctgaccctgcaggtggcctctggaacctgctcctggtgctggcagggggtcaccctggctgtgggattccaaggtggcagcagcggggtgtaaggaggcagctccggaggatgcaagtgcaggacccttgccagcccccatgcctgtcagaaggatgggacccccaaagggctgtctcagggcagtagtgctctaggacccgggctggcttaaagcagtgactcccaaccagggcaatgctgtcccccaggggagacccggcaggtctgcagacatctttgttgtcataacttagggcaagggttagcggcatcggctgggtggaggccagggaggctgctccacacccggctgcgctcagagcgctcagcagcagccccacaaggagagggacctgacccaacatgctgccagcgcccaggctgagaaaccctcacccgagacagtgttctgcgagaaaacaataaccaccttaaaccattcaatctgagggcaaaggcagggttacaagtccaaggccactctccaagctcagcttaacggtaggacgtgtctatttttggagaactggaatgagtttctgtgtcaatgagaaagagcttcacaaagtgggaacagatggacagcctgggatattctacaaagaggccttataagcacaagtccctctctctggtcccgcccaccttgcccttcacctttcccacgctttgcccggagctcaccctgccccagctgtgctgggccctcgctatttccccaagcgtccgctcgccgctggcctctgcacttgctgctctcagccgggcagtgttctgtgccctgcagcatctcacgctgagcccctttttggcagtcaccaccccctcatccccctgtctcctgaccccaaagcccctcctcatcacacttgtcttctcccataaccctatttatatcttaagccagcagttctcaactggggcaatgctgccccccaggggacatttggccacgtccagagacatttttggttctcacaaccagggatgctcccaacatcccataggtggaggccagggaggctgccccacatcctgtgatgcatgggacggccccgcagcaagagcgatcagcccaaaatgtctgtctccccacgaggctatgagccgcacacaggcccagatctgtcttgtttacccatttccctggcacctaacagactgcctggcacacagcaggggctcaaaaataagcatcgaatgagtatcatcaaataaacatatacctctactctgcaacaaatgtttttttgttttgttttggtttggttttgttttgagacggagtctcacactgtcacccaggctggagtgcagtggcacgatctccactgactgcaacctctgcctcctggattcaagcaattctcctgcctcagccttccaggtagctgggattacaggcgcctgccaccatgcccagctaattttttgtatttttaatagcgacggggtttcactgtgttagccaggctggtcttgaactcctgacctcatgatccgcctgcctcgacctcccaaagtgctgggattacaggcgtgatccaccacgcccagcctgcaacagatctttgatgaggagaatgctggttacattattttaaaaatgcagtcaggctaggcacagtggctcatgcctataatccagcactctgggaggctgaggcgggcagatcacttgaggtcaagagttcgagaccagcctggccaacgtggcaaaacctgtctctactacaaacacaaaaattagccgggcatggtggagcacacctgtaatcacagctactcaggaggttgaggcaggagaattgcttgaacccaggggacagaggttgcagtgagctgagaccgcgccactgcactccagcctggcaacagagcgagactccatctcaaaagtaaaaataaaataaaaaatgcagtcagtaggtctgagtgtaaacatgtccccttacaaaggagcagcaatgacactatagtcatgaatatttctaagtccaaagtgcttcacttccacgaatatggattccatttctccctctactaacagtacccacacaggccccctggccggacacaggccacccagctgaagacaaatctccaactgttccttgcagcgaggagcggtcatgtgactagcgtctggcaaatgggatgctggcgttaagtggtgccgcttgcggactgctcttttgaaaggaatggatgtttgctcctttgccccctctctcttcctgctggctggtatgcaggtgcagtggcaggagatgaagccgcccccaggactcaggggtggaagccgtgggaggaaaaggacacggcctccaggcctgggcacatcactaggcccaaccatttagagtttccagtcccccttgtcgtaaggatcagctcagggatgggcccagtcagcaacagagctgggacttggccagacactgaggtccaggggctctgcttcagcaggtgctaagcagaagggacagcggtctggagctgttacgggtgctaggccgaagggacagcggcctggagctgttacaggtgctaagccgaagggacagcggcctggagcggttagaggcatcttatgtacctcaccgagaaaacctgactaaaaactgtcaacatagagatgagcagagacagggaggaattcatgttaacttcatttttatactaaataataaagtatatgatcacaaaagagagaagagggaactgaaaaaagaatgaggagcctgaggatgagaactggaaccaacaactttaatagaaaggggaaaggcagccaaataggaacaaaatctaagactgaggtgaggatgacagaaagggaatgtgtactagaacaatttaaactatatatgcaccttggttgggtgcagtggctcacgcctgtaaccccagcattttggaagactgaggcagggagattacctgaggtcaggagttcaagagcaacctggccaacatggagaaaccccatctctgctagaaatacgagttagccaagtgtggtggcacactctcatagtcacagctcctggggaggctgaggcaggagaattccttgaacccaggaggtggaggttgcagtgagctatgatcacaccactgcactccagcctaggtgacagagcgagactccgtctcaaaaacaaacaaaaataaactatatatgcaccaaataatctagtcttaaaatatatacaaattgtaactgacagaactataagaagaaacaaagtccataatcacagcaagaatttaaatgcacctctcatagtaactgacagaataagcagtgggtgaaatatcactaaagataaagaagcactacaaataaaacagcatgattacaaggttgacctaataacctacagagaacactgtacctgatgacaccattcttttccgacttacatgtactggggtatataaggtaaaacgatacatttcaaaagctagaatcatatggaacccattctctgaccacaatgcaattaagccaggaaaatagtaacaaaatgatgactagaagtcctatatattttgaaattaggccaagcacagtggcttacacctgtaatcccagcactttgggaggctgaggtaggaggatcacttgagcccaggagttcgagacaagcctgggccacatggtgaaaccccatctctacaaaaattagcggggcatggtggtgtgcgcctgtagtccccactattcaggaggctgaggtaggaggatcacctgagcctggggagtttgaggctgcagtgagccacgactgtgccactgcactccagcctgggtgacatagcaagaccctgtctcaaaataaataaataataaaagattacaaattgggaaatattttacactgaatgacaataaaaaaaagactgcacatcaaaacttgtgggtacagctaaggctgtatttagagggaaatacatagccttcggtacatacatttaaaaagaaagggaaaggacaagatccacaggaaggtataagacagcaagatggaacagactggcccaactcacctcatcacctcaatgtagcccttggcagcagccacgtgcagggcagaggcgcctgtgcgggggtgccgggcctctggcatggcgcccccattcagccagcacctcgtgtcatgaaggagcaattcctcttctgcccgcttggctgcttccacatccacacctaggaggataagaggcacgaggtaggactcacaccccatgacctgaaatacccagggtcatacactgggctggccagggttcagcccagtgacttgcccagagctcttccccctgctcccctctgagactcaggaggcccagactagcccagttgtttcccaactgtactccatgcagtcgtgtgtcccactcagggtctctgagtcagcgctaagcactgggaaaacggagatcacaggcctttccccatttcaaccagaaattcaccgtatttttattatttttaatataaaaccatggccgggtgcagtggctcatgcctgcaatcccagcaactttgagaggccaaggcaggtggatcacgagctcaggacttcaagaccagcctggccaacacagtgaaaccccatctctactaaaactacaaaaaaaaaaaaaaaaatttagccaggtgtggtggcaggtggctgtagtcccagctacttgggaggctgaggcaggagaatcgcttgaacccgggagttggaggttgcagtgagctgagatcacgccactgcactccagcctgggcaacacagtgagactctgtctaaaaaaaaaaaaaaaaaagtatatatatatatatatatacacacacacacacatacaaaaatataaatataaaaaatatttatatatataatatatatataacatatatatgcatctcctatatatataacacctatatatacacatttcctatatatataaaacctatatatatatctctcctatatatgtaacatatatagacagaagtggtaatggtgataaaatgtatgaagatgctggattaagattatattggggggtggcacaacggctcatgcctgtaatcccaacactttgggagaccaaggtgggcagatcacctgaggtcaagagttcgagaccagcctgcccaacgtgttgaaaccgtgtctctcctaaaaataccaaaattagctcagcatggtgacttatgcctgtaatcccagttacttgggaggctgaggcggaaggatctcttgaatcttggaggcggaagttgcagtgagattgcaccactgcactccagcctgggtgatagagtgagactccgtctccaaaaaaaaaaaaaattatattggtagtgacaggaaaagttagatgtaattgagcactggatttgctcagtaaactttaggccatatatatatatatatggtctcgctctgtcacccaggctggagtgcagtggcatgatcttggctcactgcaacttctgcctcccaggttcaagcggttctcctgcctcagcttcttgagtagctgggattacaggcacacgccaccacacccagctaacttttgtatttttaatag[132 bp omitted]aggacctcacactgtcacccaggctggagtacagtggtgcaattatggctcactgaagcctcaaattcccaggctcaagggatcctcctgccttggcctcccaaagccggcatgagccaccacacctggctgtgtcatttctttaaaggagtcaccaactgttcaatcctattatagccgaatgggtctcaattcagggaggggaagggagggtgactggctttttattcaaccacagtcagcgccctctgcatgtctgctgcacatccttctgcaatttgcttcttgtgttcaacatgttgctgagatctgtctgtatctgtagacagagcccttgcccaggggtcagaaagctatagcttgtgggtgttgaccacctgttgtgttttctttatcttttgttgtggtggtggtggtaaaataaacaacataaaatttaccaacttccctgttttaaagtgcacaattcagtggcatttaggatacctccaatattatgcaaccatcaccactatctacttcctgagctttttcatgatcccaaatggatactgtatccaagaagaagtcactcccagccaggcaccatggctcatgcctgtaatcccagtactttgggaggccaagatgggagatcacttgagcccactagtttgagaacagcctgagcaacatagggagaccttgtctctagaaaaataaaattagctgggcatggtggtgcacacctatggtctcagctacttgggaggctgagatggaaggatcacttgggcccacgaggtcaaggctgcagtgagccattatcactccaccgcactccagcctgggaggcagcgtgagatcctgtcttaaaaaaaaaaaaaaagtcacttctcagacctccctctccgccagccccttgcacccagcaatctttctgtccctgtggatttgcctattctgaaaggcgatttttgtcaataaacgtgggatggaacagtcattcccattcattcacacaccatccctagcagtctcccgctccacagcactagtggaatagtggtgccaggcatggtgtgtcccgcaacacctgaaacattcattgtctagccctttacagagaaagtttgctgacccctgcttagatcactcatttagagtttagtgattgatccatcctctttggtgtgggctccgacctcttactactgcaaacaatactatgatgaacatctgcccatggttgggaaggcctctctcgggctgcccaggagtggaactgctagaacaaggcaaagctggggccttcggctataatccatgctgaccaaccacttcccaaagtagctggaatcatcacctttcccaccaggcagaaatcagctcccgtgtccgcccttgtcagcacttggagctatccaatggtcgattccgcctgcctccaagggtaactccccctcttccagctgacttggatgctggaattccaagtgagctggcttcaaatgtttcaaaaacacatcatgtcttcttcctgccagttccatgcccctgtgcaaagtggccagggagggtcccttctgcacaggacatggtgctgctgcgtgtccctgcagcacagctgctgcttgggcctacgaaaatccattctcccttcccctgtgacctcatcttgactttcctcacccacactttgccccatatggtttcaatgtgaccgggcccatagcctggctccagggtgcgcacatcaccaggccttcctgtcacctttgcaacagtgatgggctcaggagctgccatctgaccaaggtggcccagtgagcatcacgcacagggcaagaggtgctgtgttttggctgtgatatgggcctgcagtaggacccatgctgagtgcctcacggagagaacctgtctaagagtgaagccaacagagttcagcagagtgatagagagatgctctggacttcacttgtgcccctggatcaagctatgcctagagcccatatggacttcagctacataaggccatagactgcctttaaaaaaaaaaaatgtgaccaggcacggtgactcacgcctgtaatcccagcactttggggggccgagacgggtggatcagctgaggtcaggagttcaaaaccaacctggccaacatggtgaaaccccatctctactaaaaatacaaaaattagctgggcatggtggcgggtgcttgtaatcccacttacttggaaggctgaggcaggagacttgcttgaacccgggaggcagaggttgcagtgagtcaagaccatgccactgcactccagcctgggcaacaagagtgaaactccattgctgctgtttttcacaatagcaaagacttggaaccaacccaaatgtccatcaatgatagactggattaagaaagtgtggcacatatacaccatggaatactatgcagccataaaaaaggatgaattcatgtcctttgtagggacatggatgaagctggaaaccatcactcagcaaactatcgcaaggacagaaaaccaaacactgcatgttgtcactcataggtgggaaatgaacaatgagaacacttggacacaggaaggggaacatcacacactggggcctgtcgtggggtggggggagggacagcattaggagatatacctaatgtaaatgacgagttaatgggtgcagcacaccaacatggcacatgtatacatatgtaacaaacctgcatgttgtacacatgtaccatagaacttaaagtataaattaaaaaaataaaaaataaaaataaaaataaagaaactccatctcagagtgaaaaaaatgtggtaaaatacacacagtataaaatttaccatcttttttttttttttttgagatgctgagtcttgctctgttgcccaggctggagtgcagtggtgagatctcggctcactgcaacctccatctcctgggttcaagcaattctcctgcctcagcctcccgagtagctgggactataggtgtacatcgctatgcccggctaacttttatattttcagcagagacggggtttcaccatgttggccaggctggtctcaaactcctgacctcaggtgatctgcccacctcggcctcccaaagtgctggattacaggcctgagccaccgcgcccagcctaaaatttaccattttaaccccaattcagtggcattaagtagtcacaattggttgttgtgcaaccaatctccagaattttttcatcttgcaaaattaaaatcgtgtaccctaggtcagggacaatggctcacacctgcaatcccagcactttaggaggccaaggtgggtggatcacttgagctcaagagttccagactagcttgggcaacgtggtgaaaccccgtctccacaaaaaatataaaaatcattttaaaaaatgtgtacccactaaactacttcctattctccccactcctcccagtccctgactacagccattctactgtctgtctccattattttgactattctgggtacctcacagacgtggaatcagacagtaattgtccttctgtgactggcttattttcacttttcacttagcataatgtcctcaagatacatctacattgtgtgttttttgttttgtcttgttttgttttttgttttgagacacagtttcctcttgttgctcaggctagagtgcagtggcacgatcttggctcaccacaacctccacctcccaggttcgagtgattctcccgcctcagcctcctgagcagctgaggttacagggatgtgccaccacccctggctaattttgtatttttagtagagacagagtttctccatgttggtcaggttggcctcaaactcccgacctcaggtgatccgcccgcctcggcctccctaagtgctgggatgaagactgaatcatgtcccaccgcatggatgggccacatgttgattttccattcattcgatgatgggcactaggttgctcctacctctgggctattgtgaacgatgctatgaacacgggtatataaattgccttttttgttttggtttatttggttgagacagggtcttgcccccaggctggagtgaccgtggttcactgcatcttccacctcccaggctcaagcaatcttctcacctcagcctactgagtagctgggagcgtacgtgcattcccacgcctggctaatgtgttttgttttatagagatgggttctcactaggtttcccaggctggtctcaaactcctgggctcaagagatcctcccatcttggcctcccaaagtgctgggcttacaggtctgagccactgtgccaggcctcaaatggccttttccggcctgagccaggaggaacgggttttggttcttgcaaagagtcatgcccgattcagcccctgagtcgactgggccagaggactttgcggtgttggagggagcggtggctccaggccacgaggtgactggctgagcagatcacgtgctctcactgaaccccagacccagagagaggaaaacagcaagtaagccagggaaagcgaaggggatggtcgtgcctgaggccggtctgtcttctctcccagccctgcctgtgagtggctgccagggccacactatggccagagccagtctggatgccagcacctcggggaattctgcatcatgtgggcgtgtcctgcagggggtgcaaaagacccgccctccttagagctggggtgcagcctgtgatccaggtcctgcgcactgcagcccctctgaggctcctgtgtggagccgggtgtcacagggtgtcacaggcagtcgccttgtgatttggggccgcagagtcccaccccgagcagcacggctgagggtctttccagtggccccagtggtcttcgttcctggctgatcctacaagccaatatcccccaccaatgtatccctcccagccttctcctcaccccacgggagggaagaagcatggccccctctgagaagctgatgcaagttatgagcaatttctgcaggaaaatacaacgtcagaaagttcacagaccccctggaggccattcccggcctccctggggtccaagggaaaaggaggactgatccagacagagggagcctaaatcacccagatctggatccctagctgggccctgaaccagagcgggagaggctacaaagaatgtcaaggagaaacgcaggcaacagtgtagcatcaaggttggtgcagtgggtgagagtgtagcatcaaggttggtgcggtgggtgagagtgtagcatcaaggttggtgcggtgggtgagagtgtagcatcaaggttggtgcggtgggtgagagtgtagcatcaaggttggtgcggtgggtgagagtgtagcatcaaggttggtgcggtgggtgagagtgtagcatcaaggtcaacacagggggtagcgtgttgcatccctactgtggttctgcaggaggttttccttgtggcaggagatacctgctgtgcatcaggcgaagatgtacaatgcctgcaacacagtctcagaatggccgggctcacgcctgtaatcccaacactttgcgaggccgaggccagcagatcgcctgaggtcaggagttggagaccagcctggtcaacatggtgaaaccccatctctattaaaaatgcaaaattagctgggcatgctggctcacgcctgtaatctcagctacccagaagctgaggcaggagaatcgcttgaacccaggaggtggaggttgcagtgagccgaaatcatgccattgcactccagcctgggcaaaaagtgaaactctgtttcaaaaaaaaaaaaaaggctcaggaatggaaaggcaggggtggggtggtaagaaaggaagggagagatggagggaaaaaaacaggaggagaaaggataggaaaaaatgtgtttatgtctatacctgggaagagatcgcaagggagggacagagagaaggaacacaaatctatcaaaaagttaaaagctgatgattctatactgtatgattccctttatgtgaagtgtacaaaacagcaaatccacagacagaaggcagagagggcttcgtggggtgggggggaggggggggtgcatggttgggggtgatggctaagcggttgcagggtttcgttgggggatgatgaaaatgttctacaaccaatgtggtcataaatgcccgaccccgtgaatagactaaaaagcactgaagtgtgcactttgggtgaattgtagggtaggtgaattacatctcaaaaagctgtctaaaaaacaaaaacaaaaaagaaaaagcactggcgaatcttagtgaaagtcatatgggtagtcacatgctattgcttcaacttttctgtaaatctgaagctttcccaaaataaaaagttggaggaggaaggagacagaatccaggtccagggctgatttgacccactccccatttcaaccaaagaggggctcccgaacctcagatctccgccgtcacgtgtcccactagctagtcctcccgcatggctctcgtggacccctgaacccacgcggaatcctatcctttcagcctggccagcggccccgtcaggacagccgcgtcagaagtctcggaggctgccggtatctcatttcctcgtcagtctccctttccttccacacggtcccctggagtctgccgggaaccatgctcacacccttccactccaacccagccagaccctgacaaccaccccatgaagcggcaccagtggtcctgttttaggaaatcagggaagcaagcttcagggacgtgcctggagtcaccagtcacaggcagagctgggaggcaagcccaggactttagaagacatgctggggacccagggatcctgtgtggccatcacacacctgctagaagcaacaccccttccctagaaaaatgaacctggccagacacagtttcaggggctcctggaccccatatgaaggctcctggggtacgatgagtctcagaggacagggagaccagtccctggcaacccctgcatgcccctactcccccccaagtaaacgcatcccctcccagaaagacctgcggcagggttccagcaatcctacctaacgcactcctgggtgagtccctccacccacccaccccgccccggcattccaatcccctcagttactcagggggattgacagtcccagttggtaggggtttgagttctcatcctgtgcgtgtgctgggctccaagcaatcctggaggcaggcccctacacccccatttcacaggtgaggaaactgaggcacaaagaaagacaatcctaggaagcagggtcagcctcggtgcccaggccgcctctaaagctctcagcctggagaccacgggtgaggaggtgtcccccaccccacacacagcacaccagagcccacctcggcgggcgatctccgccttcagcagcccctccatggcgtccgactcggccaggtccaggggcaggtccccgtcactgttgacggcggcgatgttggccccgtggctcaggaggtacctgggggtgggggctggtcagggctgagggtccaggcccccaccccgaccaggtcctgcccggccctcccttgcctcacctggcgatatctaggtagccacaggaggcggccacgtgcagtggcgtccagccctcgttgtctgcctggttcacagtggcgccctgctccaccaagaagcgcaccacctccaggttctcatcaatgcaggcctgggggtgggaaacagccgtcagccgcacctaccccagccacggtgtcccagcaagtcgggactccagagggagccacgaaaacagatccagggacacggtgctaggacagtggggaaaatgacccaacagcctctggccactggctgtttaagatacgcctggttgcccagtggtcaggccggccaggccttcagtgctcagtggaaaccacgaaaggactcctggctatctgcaaacaggaagtgaacggggaagggagggggcttctcatctgggtgcgggaaccccacatggtacctgttagacacggcaaaacccccgtcaccacccacaggtggcgcttccagtgctcagactagggaagaggttccagcccctcctccttcagagccaggagtcctggcccccagcccctcctgccttaaacccagccaggtccttccaagggtcaagctcggaaaccaccccagcagatactctgcaggaacgaagccgtgggcccagggctatgcagggtggaggaaggccaccctgtgctgggacagactcaggggcctgggcgggactcccagaggggtgagacagctgcacacctgtgtgcctgggccccaggctgtcacactccagttcactgaggccccctctgcacggggccctgcagccaggggctgacacgggccaccgtttctcattcttcccttaggggtccaaaacttggggggacaaaagccgaagtccagggggtcggaggagggacttgccccaggccttgtggacactgggtgggctccgggacctgaactggagctgaggaaggagtgaagctaaactcctagatccacgggataaattaccccccaagtccctcacctctccaaagctgcccatctggaggaggcgggagggagctacgagggccaagagcatgaggtcatggaaactcgggctgtgaaggggccgcacgtgccctgggaacgggatgaactcggctcgtttatttccacccagttgtcatggcgataggggaggggggcaaggagagcaatgggcctttccctttcaaggacctgcccagtacaggcatccctgtgaaagatgcctgaggcctgggcaccagggactccagagtccaggcccaacccctccccattcaacccaggaggccaggccccagcccttccgccctcagatgaaggagtccaggcccccagcctctccccattcagacccaggggtccaggcccagccccgcctccctaagacccagaagtccaggcccccagcccctcctccctcagacccacgagtccaggccccagcccctcctccctcggacccaggagtccaggcccccagtccctccaccctcagacccaggagtccaggccccagcccctcctccctcggacccaggagtccaggccccagcccctcctctctcaaacccaggagcccaggcccccagctcttctctgttcagccctaagaatcctggctccagcccctcctactctagcccccaaccccctagccactaaggcaattggggtgcaggaatgggggcagggtaccagcctcaccaagtggttgataaacccacgtggggtaccctaagaacttgggaacagccacagcaggggggcgatgcttggggacctgcctggagaaggatgcaggacgagaaacacagccccaggtggagaaactggccgggaatcaagagtcacccagagacagtgaccaaccatccctgttttcctaggactgagggtttcagtgctaaaactaggctgtcctgggcaaacagcataagctggtcaccccacacccagacctgacccaaacccagctcccctgcttcttggccacgtaacctgagaagggaatccctcctctctgaaccccagcccaccccaatgctccaggcctcctgggataccccgaagagtgagtttgccaagcagtcaccccacagttggaggagaatccacccaaaaggcagcctggtagacagggctggggtggcctctcgtggggtccaggccaagtaggtggcctggggcctctgggggatgcaggggaagggggatgcaggggaacggggatgcaggggaacggggctcagtctgaagagcagagccaggaacccctgtagggaaggggcaggagagccaggggcatgagatggtggacgaggaagggggacagggaagcctgagcgcctctcctgggcttgccaaggactcaaacccagaagcccagagcagggccttagggaagcgggaccctgctctgggcggaggaatatgtcccagatagcactggggactctttaaggaaagaaggatggagaaagagaaagggagtagaggcggccacgacctggtgaacacctaggacgcaccattctcacaaagggagttttccacacggacacccccctcctcaccacagccctgccaggacggggctggctactggccttatctcacaggtaaaactgacgcacggaggaacaatataaattggggactagaaaggtgaagagccaaagttagaactcaggaccaacttattctgattttgtttttccaaactgcttctcctcttgggaagtgtaaggaagctgcagcaccaggatcagtgaaacgcaccagacggccgcgtcagagcagctcaggttctgggagagggtagcgcagggtggccactgagaaccgggcaggtcacgcatcccccccttccctcccaccccctgccaagctctccctcccaggatcctctctggctccatcgtaagcaaaccttagaggttctggcaaggagagagatggctccaggaaatgggggtgtgtcaccagataaggaatctgcctaacaggaggtgggggttagacccaatatcaggagactaggaaggaggaggcctaaggatggggcttttctgtcaccaatcctgtccctagtggccccactgtggggtggaggggacagataaaagtacccagaaccagagccacattaaccggccctgggaatataaggtggtcccagctcggggacacaggatccctggaggcagcaaacatgctgtcctgaagtggacataggggcccgggttggaggaagaagactagctgagctctcggacccctggaagatgccatgacagggggctggaagagctagcacagactagagaggtaaggggggtaggggagctgcccaaatgaaaggagtgagaggtgacccgaatccacaggagaacggggtgtccaggcaaagaaagcaagaggatggagaggtggctaaagccagggagacggggtactttggggttgtccagaaaaacggtgatgatgcaggcctacaagaaggggaggcgggacgcaagggagacatccgtcggagaaggccatcctaagaaacgagagatggcacaggccccagaaggagaaggaaaagggaacccagcgagtgaagacggcatggggttgggtgagggaggagagatgcccggagaggacccagacacggggaggatccgctcagaggacatcacgtggtgcagcgccgagaaggaagtgctccggaaagagcatccttgggcagcaacacagcagagagcaaggggaagagggagtggaggaagacggaacctgaaggaggcggcagggaaggatctgggccagccgtagaggtgacccaggccacaagctgcagacagaaagcggcacaggcccaggggagagaatgcaggtcagagaaagcaggacctgcctgggaaggggaaacagtgggccagaggcggcgcagaagccagtagagctcaaagtggtccggactcaggagagagacggcagcgttagagggcagagttccggcggcacagcaagggcactcgggggcgagaggagggcagcgcaaagtgacaatggccagggccaggcagatagaccagactgagctatgggagctggctcaggttcaggagagggcagggcagggaaggagacaaagtccaggaccggctggaggggctcaacatcggaagaggggaagtcgagggagggatggtaaggaggactgcatgggtcagcacaggctgccaaagccagggccagttaaagcgactccaatgcggaagagagtaggtcgaaggggaatggtaaggaggcctggggcagagtggtcagcacagagtggctaagcccagggccagttgaagcggctccaattcggaagtggggtggtcgaaggggaatggtaagggggactgggacggggtgtcagcatagggtggcaaagcccagggccaggaacgacggggcggatcgagactggcaacggggaaggaggatgccccaggtggcgcagcagagggtggacctggccccgggagacgccgggcggggggcgctgacctggtgcagggcgctgataccgtcggcgttggtggagtccagcacggcgcgggcgggcggcggcgcggcggggtcgagctcggcgccggggccagggtcggcggcgcgcagcatcagacgcgcctcgtccaggtcgccgcccgcacaggccgccaggaactcggcggcgcgctcgaagcggacggtgcgggcgcggcgctctccggggccaggctcggcgcccgcccgcgccccccactgccgcagctgctcccgtcgccgctcccgggcagccgccgccgccgcccccgggccagccgccgggccatcctctccggacatcgcaccgcccgcccgcccagcgagcgagcgagcgccgagccccaaccgccgccaccacccgcccgcccgcccgccccgggggccgccgggaactgccgctggccccccaccgccccaaggatctcccggtccccgcccggcgtgctgacgtcacggcgctgccccagggtgtgctgggcaggtcgcggggagcgctgggaaatggagtccattagcagaagtggcccttggccacttccaggagtcgctgtgccccgatgcacactgggaagtccgcagctccgaggcgcccagtggaaatcgccagatgagggcctcctccggggaatgctgggaaatggagtctacaggccggaggggtgccccacggcatactaggaagtgtgtagcaccgggtaaaggggatgaatagcagactgccccggggcagttaggaattcgactggacagccgcgtgggagggagtgcggggagaggcagagttgttttgttattgttgttttattttgttttctttgttttgagacggagtctcgctctgtcgccacgctggagttcagtggcgcgatatcggctcgctgcaacctccgcttcccaggttcaagcaattctggctcagtccccagagtagctgggataacaggcgcgcgccaccccgccctgctaatttttatatttttagtagagacgggatttcaccatgttggccatgatggtcttgatctcttgacctcatgatccgcccgcctcggcctgtaatcctgctgggatgacgagcgtaagccaccatgcccagctgggttttatttattttggtttttttcctgaccccttaactagaaataagctccacgagagcgggatcttttgtcttctgtgcactacttgtcctcggttcttagaacagaacctgagagaacctgatcgcaaatatttttggaatgaatgaatgaatgggttcaccagggcaccatgggaaactgagtccgcaacctagaagccatgaaagacagtccacttccaagcttccctgggtgacctcgcagggcatgctgggaaatgaaatttgcggtgaaaaggtcaggaccacgatcctagggcacgctgggaaatgtagcccacagggccacacccctaaaagcacagtggggtgcaaggcagggccccaaggcatttagggctcggggcaagagaaatccacactccactccctaatggtaatccctgagccacaccgagtaaaggaacccaagacacagtgtccacagggacagggctctcagagctttcactggcccgcgcttctcctgcgcccacccggacctcctgggaaccgcccaggccctcgcgcgctctcaaggcatgctgggattggtggtcccgggcaaggagttccagcaggtggggggcgaatcacctttcagcgggcccaagcgatgagcacaccttgatcttcaccttacggatcccgcgcccaactcaagattgggaaggtggctggcactttgtgacaggaagagtcccataaaaatcatacagaaaagggccaaaatcgggacagagactacagactgtttcccaagcgctgtgggagtttcccacccactctgaagtccttgggtttgcgcggagacgtaaactgcgcatcccacgaggcctgtttctttccctctctctttctcttttgttgttgttgttgctgctgctgttacgaaaatttttgtggttttattgtatcatgaggcattgaaacatccggcgactcaatgtctaggcggtgaggcagccgctttctccttcactttctttgggttaagtagagcaacttgtc[169 bp omitted]ccaccacgcccggctaatttttgttttttagtagagacggggtttcaccatgttggccaggctggtctcgaattcctgacctcgtgatccgactgcctcggcctcccaaaatgctgggattacaggcgtgagccgccgcgaccggccagattttttttttttttaaaggacaaccttttgcattacttaagtctttccaaggcatgcgctggtacaacacaaacttttcccattacatgcagctagtctagtgtccagacgtcatgcacaacacctccgtggcatcagcgcactgcgcccactcccactgcgaccctgctcatttgtgcatcatatctggaggagtggcaatagttctggaaagaggagggaagaggaggcagcgtgagggcccggtggagaggaggtcagctgaagttgtgcagagcaagcctgcatatcattggtgcaaacccaagcatcattgcatcgctgatgttttgttttgtttggttttgttttgtttttgagacggagtctcactgtgtcgcccaggctggagtgcagtgatgtgatctcggctcactgcaacctccgcctcccaggttcaagtgattctcctacctcagcctcccaagtagctgggattacaggcgtgctccacgcctggctaatttttgtatttttagtagagacaaggtttcaccatgttggccaggctggtctcgatctcctgacctcaagtgatccacccgcctcagcttcccaaagtgctgggattacaggcatgagccaccacacccagctgatgttctttagtaggaatatctggtggaaccccaagatggggtcttcatccgccacgaagcctgtttctatagaaagggatagttctggtggctcttaggtgtggtccctgaaccccacactttccacatacttacacaccaacctccttcccccaggaaaacaagaagtcggtcttcagggtgttaccgtgtagctctggttctgtatgtattctgtgcctttatgtataattgtgtgtatttgcaatcatgtctgtggctggatgtatgttgtttatgagtttgtgtttatggtttgtttttgtttgtttgtttgtttgttttgagatggagtttcactcttgtcatcgcccaggctggattgcactggcgcaatcaaaaaagagtaaaataacagaaatcagaatgggcttataatactcttacccctctccacacaggacagaagagtcaattttatacttttgtggatgttctaacttcacctgcttatctgaaccatctttatggtgcagactaatatctatttttctgctgttacagaagaagtgggaacattttcttcttatctttctgaggttatttacaccagtgaggagggcctgcagttccaaggttaagcaccaacattccactgttaccattgagagcaaagagcagaccctagaagtgaaaacaaaacctttaccacaggaagacaagagcaaaagatgatgttcttgagtggcatatgaagatgctcacagccaacatcacatgcctatcagatattttatgtacatcatctcatcaactccaggaggcagagactaagagactagccccagtcacagagctagaaattggccaagacaaggttcaatctgaggactgtcaaatccagaactggaatttcttttttttttttttttttttgagatggagtctcgctctgtcacccaggctggagtgcagcggcatgatctcagctcactgcaacctccacctcttgggttc[131 bp omitted]gcctcccaaagtgctgggattacaggcatgagccactgcacctggccttagaagcctcagttcctgatggcagttgggatctgcctttccttccctggactgcctacctcttgtcttttaggttacatatgagaaaacaaacctccaattcaccaaaactattgttatttggggagctgtctcttactatcagccaaacataactcctcaatgacactgttagtttagcactgccattataatcaggagggatctgggtccagctgcgggaacatgaagaggcactagtgggatgaccacagccagcccctgttgattcaccaggagactgcagatgcatgagcaagtccagccaagatcagccagacaagaactcccagcggagcccagcccaatttgccaactctcaaactataatttttttttttttttttgagacggagtctcgctctgtctcccaggctggagtgcagtggcgcgatctcccctcactgcaagttccacctcctgggttcacgccattctcctgcctcagcctcccgagtagctgggactacagacgcctgccaccacacctggctaatttttttgtatttttagtagagatggggtttcactgtgttagccaggatggtctcaatctcctgacctcatgatccgcccgccttggcctcccaaagtgctgggattacaggcatgagccaccgcgcccagccctcaaaccataagttaaatagatgactgttgactcaagccactaatatttggggtaacttttttcttttttctttgctttttttttttgagaccaagtcccactctgtcatccaggctggaatgcagtggcatgacctcggctcactgcaacctccacctctgagggtcaagtgattctcctgcctcagcctcctaagtaactggaattacaggcaccagccaccatgcctggctactttttgtgtgttttcagtagagatggggtttcactatgctgaccaggctggtcttgaactcctggcctcaagtgatccacccgcctcagcctcccaaagtgctgggattacaggcaggggtgagccactgcgcccacctggggtaactttttatgccacaaaagcaaactgatgcaaggcattccaagaggcctttgagcctcttgcaagtcaagctgattgcaagacactctgcctttgataaaatgtagtggacagagaagcagtggtttcagtggcagagatgacaaattgttgcccaatattcgttgtccccttctttctcaacaaaatggaacctctgattatgctgggtttagcatagccatctagaataatggttacatatcccagtgtcgggcctccgagcccaagctaagccatcatatcccctgtgggcctgcacatatacatgaagatggcctgaagcaactgaagatccaaaaaagaagcgaaaatagtcttacctgatgacattctaccattgtgatttgttcccgccccaccctaactgatacgatatattctgcctggtccttaagaaggtactttgtaatattctcccccgcctttaagaaggtactttgtaatattctccctgcccttgagaatgtactttgtacgcccatcccaaacctataagaactaatgataatcccacctttgctgactctgttttcggactcagcccacctgcacccaggtgaaataaatagcctttttgctcacacaaagcctgtttggtggtctcttcacacggacgtgcgtgacatttggtgccgtgactaggatcaggggacctcccttgggagataaatcccctgtcctcctgctctttgcaccgtgagaaggatccacctatgacctcgggtcctcagaccaaccagtccaaggaatatttcaccaattttaaattgggtaagcagtctctttttactctcttctacaacctctctcactatccctcaacctctttctcctttgaatcttggcgccacccttcagtctctcccttctcttaatttcagttcctttccttttctggtagagacagaggagacgtgttttatacgtgaacccaaaaccccagcgctggtcacggactcgggaagacagtcttcccttggtgtttaatcactgcggggacgcctgcttgattattcacccacgtttcagaggtgtctgatcaccacggggacgcttgccttgatccttcacccttagtggcaagcaccactttcctggggggcaagcaccccccaccccttctctccatgtctctactctctcttttctctgggcttgcctccttcactataggcaaccttccaccgtccgaccctccttctcccttagcctgtgttctcaagaacttaaaacctcttcaactcacacctgacctaaaacctaaacaccttattttcttctgcaatgctgcttaaccccaatacaaactcgacaatggttctaaatagccagaaaacggcaattttgatttttccatcctacaagatctagataattcttgtcgtaaaatgggccaaaggtctgaggtacctgatatccaggcattcttttacacattggtccctccctagtctctgttcctaatgcgacttgtcccaaatcctccttctttccctcctgcctgtcccctcagtctcaaccccaagcgtcactgagtcttttcaatcttccttttctaccgacccatctgacctctcccctcttccccaggctgctcctcctcaggtcgctccccaccaggctgaatcaggctccaattcttcctcagcctcctctcccccgccctataatccttccatcacctcctctccccacacccgatccagcttacagttttcttctgcagctagccctcccccacctgcccagcaatttcctctgaaagaggtggctggagccaaaggcatagtcaaggttaatgctccttttcctttatccgacctctcccagatcagttagtgtttaggctctttttcatcaaatataaaaaccccgcccagttcatggctcgtttggcagcacccctgaggccctttacagccctagaccctgaagggtcagaaggcctcttattctcaatatgcattttattacccaatctgctcctgacattaaataaagctccaaaacccccacaacaggacttaattaacctcgccttcaaggtgtacattaatagagtagaggcagctgcatagcaacatatttctgagttgcaattccttgcctccattgtgagagaaaccccagccacatctccagcacacaagaacttcaaaatgcctacgccgcagtggtctagcattcctacaggacctcctccatcaggatcttgcttcaagtgccagaaatctggccactgggccaaggaatgcctgcagcccgggattcctcctaagctgtgtcccatctgtgcaggaccccactggaaattggactgtccaacttgtccggcagccactcccaaagcccctggaactccggcccaaggccctctgactgactccttcccagatcttcttggcttagcggctgaagactgacactgccccatcacctcggaagcctcctggaccatcacagatgctctgggcaactcttacagtggagggcaagtctgtccccttcttaatcaatacggaggctacccactccacattaccttcttttcaagggcctgtttcccttgcctccataactgttgtgggtattgacggccaggcttctaaacctcttaaaaccccccaactctggtgccaacttggacaacactcttttatgcacttctttttagttatccccacctgcccagttcccttattaggtcaagacattataaccaaattatctgcttccctgatcattcctgggctacagccacacctcattgccacccttttccccagttcaaagcctccttcacatcctccccttgtatctccccaccttaatccgcaagtatgggatacctctactccctccttggtgaccgatcatgcaccccttaccatcccattaaaacctaatcacccttaccccactca[185 bp omitted]gtggcgggcgcctgtagccccagctactcgggaggctgaggcaggagaatggcgtgaacctgggaggcagagcttgcagtgagccaagatcgtgccactgcactccagcctgggcgacagagcaagactccatctcaaaaaaaaaaaaaaaaaaaaaaggttaaagcctgttatcacccacctgttacaacatggtctcttgaagcctacaaattctccttacaactcccctatcctacccatccaaaaccagacaagtcttacaggttagttcaggatctgtgccttatcaaccacattgtcttgcctatccaccccatggtgccaaacccgtatactctcctatcctcaatacctccctccacaacccattattctgttctagataaacctagctgaccccataaatcctaaatcctttccccact[132 bp omitted]aaccccatctctactaaaaatacaaaaaattagccgggggtggtggcgggtgcctgtagtcccagctactcaggaggctaaggcaggagaatgacatgaacctgggaagcggagcttgcagtgagccgagatcgcgccactgcactccagcctgggcaacagagtgagagactctgtctcaaaaaaaaacaaaacgaaacaaaaaaacaaaaaaaaacagccctaaaagctgctcccacactagctgtccctaactcatcccaacccttttcatcacacgcagctgaagtacagggctgtgctctcagaattcttacacaagagccaggaccgcgccctatagcctttctgtccaaacaacttgaccttactgttttagcctagccctcatgcctgtgtgtggtggctgccgctgctttaatacttttagaggccctcaaaatcacaaactatgctcaactcactctctacagttctcataactttcaaaatctattttcttcctcatacctgatgcatatactttctgctccccggctccttcagctgtactcactctttgttgagtctcccacaatcaccattgttcctggcccggacttcaatccggcctcccacattattctggataccacacctgaccctcatgactatctctctgatccacctgacattcaccccatttccccatatttccttctttcctgttcctcagcctgatcacacttggtttattgatggcagttccaccaggcctaatcgccacacaccagcaaaggcaggctatgctatagtatcttccacatctatcattgaggatactgctttgcctccctccactacctctcagcaagctgaactcattgccttaactcaggccctcactcttgcaaaaggactacgcgtcaatatttatactgactctaaatatgcctttcatattctgccccaccatgcagttatataggctgaaggaggtttcctcactacgcaggtgtcctccatctttaatgcctccttaataaaaactcttctcaaggccacttctcttccaaaggaagctggagtcattcactgcaagggccatcaaaaggcatcagatcccattgctcaggacaacgcttatgctgataaggtagctaaagaagcagctagctttccaacttctgcccctcacggccagtttttctccttcacatcggtcactcccacctactcccccactgaaactgccacctatcaatctcttcccacacaaggcaaatagtttttagaccaaggaaaatatctccttccagcctcacaggcccattctattctgtcgtcacttcatagcctcttccatgtaggttacaagccgctagcccatctcttagaacctctcatttcctttccttcgtggacatctatcctcaaggaaaccacttctcagtgttccatctgctattctactacccctcagggattgctcaggtcccctcccttccctacacatcaggctcggggatttgcccccgcccaggactggcaaattgacttcactcacatgccctgagtcaggaaactaaaatacctcttggtctgggtagacactttcactggatgggtagaggcctttcccacagggtctgagaaggtcaccacagtcatttcttcccttctgtcagacataattccacggtttggccttcccacctctatacagtctgataacggaccagcctttattagtcaaatcacccaagcagtctctcaggctctcggtatttagtggctcctggttttacctcaaatcgccttaagtctctcttgaagtggatagatcttcagtggcaaggtaccctccaatactttcaccctgatgaagtcctattctttacttctatgctcactgttattctggttcccattctttttttttttttgagacagagtcttgctctgttgcccaggctggagtgcagtggcgcgatctcggctcactgcaagctccgactcctgggttcacaccattctcctgcctcagcctccggagcagctgggaccacaggcgcccgccaccacacccagctaattttttgtatttttagtagagatggggtttcactgtgttagccaggatggtctcaatctcctgacctcgtgatccgcccgcctcagcctcccaaagtgctgggattacaggggtgagccaccacgcccggccttggttcccattcttatgccatcctctacctctccccagctatctccaccacactatcaatctcactctctcccagccatttctaatcctcctttaacaaacaattactggctttgcatttctctttcctccaaaattgccaaggcctcgacttactcactgctaaaaaaaaaaaggactctgtatatttttaaatgaagagtgttgtttttacctaaatcaatctggcctggtatatgacaacacaaaaaaactcaaagatagagccccaaaactcaccagccaagcaagtaattatgctgaacccccttggacactctctaattggatgtcctgggtcctccgaattcttagtcctttaatacctgcttttctccttctcttatttggaccttgtgtcttctgtttagtttctcaatttatacaaaaccgcatccaggccatcaccagtaattctagaaggacaaatgctccttctaacaacccccagtatcaccccttaccccaaaatctttcttcagtttaatctctcccactctaggttcccacgctgccccaatcccactcgaagcagccctgagaaacatcgtccgttatctctccataccacccccaaaaattttcaccgcccgaacacttcaccactattttgttttgtttttcttattaatataagacaggaatatcaggcctctgagcctaagctaagccatcatatcccctgtgacctgcacgtacacatccagatggcctgaagcaaccgaagatccacaaaagaagtgaaaatagccttaactgatgacattccaccactgtgatttgttcctgccccactaactgataccatatattctgccccacccttaagaaggtactttgtaatattctccccgcccttgaatgtactttgtacgcccatctcaaacctgtaagaactaatgataatcccaccatcctttgctgactcccttttcagactcagcccacctgcacccaggtgaaataaacagccttgttgctcacacaaagcctgtttggtggtctcttcccacagacgcacgggacaccagcatccctaccaactgggtatgataatgtaattaacttctgtcaatgagactgagtaggagtaaacatgtctccttccattttaccccagtctgcggtctgaaacagagtgggaactatcttaccctatgggcaaaggcaaccccctggggaaaggagctacacagtaggatgagcttggacccaggcaatgttacaaaacagagccatcatcccaactcagacttttacatgtgaaagaaatcaactattgtcagccaggcaaagtggctcacacctgcaatcccagcattttgaaaggctgaagcgggaagactgcttgagcccaggaggttgaggccgcagtgagctgtgattgcaccactgcactctag[225 bp omitted]ggaggctgaggcaggagaatcgcttgaaccagggagtgggagcttgcagtgagctgagattgcgccactgcactccaacctggtgacagagcgagactccatctcaaaaaaaaaaaaaaagaaaaagaaaaagaaattaaaacaaaaaaagaaagaaagaaaaagaaaatcaactgttgtgttggtccatttgggctgctgtaacagaacaccgtagacctggtcatttacaaacaatacaaatgtattgctcacaggtctgtaggctggaaagaccaggatcagggcgccagaagactcagtgtggagggagggcctgctctctgcttcacagatggtgccttcttgctgtgtcctcacacagccaaaggggcaaggggctctccctcaagcctcttttataaggacattaaccccatttgtgagggctctgccttcatgacctagtcacctcctaaagtcccgtggaatactattgcattcatgatcaggtttcaacatgtaaattttgaggggatacatacattcaaagcatagcaactgtctggttatttgggatttagggcccagtggccagacccacatggtcactaataagacatcccaaatggaaagtcggaaaggcagaacagcaaacaatacttattgtcactgaactgactctcccatacgaaactttacgtgtcactttttaaatttacttttgcattgtgtgtgtgt[136 bp omitted]tcagcctcctgagtagctgggattacagccaccactatgcccagctaatctttttttctttttttttgtaatttagtagagatagggtttcctcgagttggccaggctggtcacaaactcctgacctcaagagatcctcctgcctccagcttgcagtgagccgagatcacgccactgcactccagcctgggtgacagaacgaaactctgtctaaaagaaaaaaaaaagagatcctcccgcctctgcctcccaaagttctgggattacaagcaggagtcacctcgcttggcctgcttttgaatttcttaatttggatatgcttaacatatcataagatgtaccaactaaagtacaattcagagtttttcagtatattcacgttgtgcaaccatcaccactatctaattccagaacatgttcatcatcgaaaaagaaacgccattctcttagccgtcatctctacccaccgtcccctagcccctcaaaaacacgaacctccttcctacttctgtggatttgcctattctagaaaattcatataagtggaatcatatgtgacctttgatgtctggttcctttcgcttagtatgttttcaaggttcgtgcgtgtcacaccacatgtcagcacttcattcctttccgtggctagacaacattccactgtgtggatgaaccaacgtatgtttatccgttcatcagttaatgagcatttgagttgcttctgccttttggctattatgaaaaactagcggtgggccaggcgcggtggctcacggctgtaatcccagcactttgggaggctgaggcaggcggatcacctgaggtcaggagttcgagaccagcctggccaacatggtaaaatcccgtctctactaaaaacacgaaaattagctggcgtggtggcaggcgcctgtagtcccagctactcgggaggctgaggcagaattgcttgaacccgggaggtggagg[138 bp omitted]ggcgggaggatcagctgaggtcaggagtctgagaccagcctgaccaatatggtgaaaccctgtctctactaaaaatacaaaaattagccaggcatgttggtgggcacctgtagtcccagctgcttgggaggctgagacaggaaaattgcttgaacccgggaggtggaggttgcggtgagccgagatcatgccactgcactccaggctgggtgacagagcaagactccatctcaaaaaaaaaaaaaaaaaaagatgctgcggccggtgcagtgattcacacctaaaatcccaacactttcagaggctgttgtgggaggatcacttgagcccaggaattcaaggctgcagtgagccgtgatcacgccactgcactgcagcctgggcgacagagcaagaccctgtctctaaaaattaaaaataaaaatgctactatgaacattcatgtacaagcttttgtgtggacaaaggttcttggttctcttggatatacatccaggaggggaactgctgggtcctgcagaaatgctttcacttgttgaggaaccgccaggctgcttgcaaagctgttgcattttccattcccaccagcagtgtgtgaaggttcagcctgccgtactttaatgattattggtgacactctttcaagtaacttgttggtaataagaagtcaattaaccaggagagaccagctgcatctcaaccataataacatcagagaacccagcgggtgtctgaggggagcgtttatttcaagctaccgatgggacaaacactcccaggcttcccaggtgccactgtccggggcggcatcctcacttccagcggcctccaacgcggcccttccctgcccccttccggctgtagaagaatgaggtggtatcaggaaaaaggggcccctccagtctctgaaatgggccccaggccctcaattcaggaagcccattccccaaaatattagccctccctgcccagaggaagcagtgagcaaaacaactgtcacctcttttgggttctatgactggggggcagcggctggtggtcaaagcctcgctgacatgtgggagctgatatttgggggcgagtgcagggtgttcatgggggagctgatgaatgtttatgagtcaggggccagggtggggggaggaagggttggatgatctgggcatgggtgggtaacacgcaggaagggctggggtgaaagagacaggaaatgggagaagaggagaagggagagggagaggagggaggaagga[223 bp omitted]gaggcaggagaatcgcttgaacccgggagatggaagttgcagtgagctgagatcactccactgcactccagcctgggtgacagagcgagacgcagtctcaataaaaaaaaaaaaaaagaaagaaaaagaaaaaggaactgagacccaggattccgagagcagagagaggaggacagagaaggaaggacaaagagaaaggggcagaaactcaggcagtgggggatggagcccacagagggagggaaagaggcctgagagtcagcgggagggtagggacaagagcaagggcttgagacggtcacactcacaacttctgggcgtggctgatgcggttgtacagcacgttgatctgcggaggcagaagacagatgctgggacagccggtggggacgtggggacgggccacccacccctgcctggagtttgctggtccctcccagcccagccctgccctctctccctccctccctgcggagctgggtctcacctcatatttctgctgtttcagcttcgccatcaggtcgaacttctcagactccagctggtggatccagtccgacagctcctgggctttctccctggcagggcaggagggctgtgatggaggcagccaggcagaccgggccctaggcccagggacggagaggaacttgggcccagagaggttgtgggaaccacccaaagccacacagcgagactgtgagttcagcgttgtcggcaccattttgttcatatttgaggccgagagttttaaaatctgtgcccactttctccacatccgagctggagctctcgcatttcccaaggggagagaagggtgtcatgattaagagaccaggctcggcacctgtaatcccagcactttgggaggcagaggccagcagaacacttgagcccaggagttcaagaccagcctgggcaacaaagagagaccccgtctctgctaaaaataattaaaaaaattagccaggcagggtgtttccggctacttgggaggctgaggcagaaggaacctgggaggtcaaagctgcagtgagctgtgattgcaccactgtattcctgcctggcaacagagcaagacaaaagaaaggaaagaaaaggagaaaggaaagtggggaggggaggggagaggagaagaggggaggggagaggagaagaggggaggggagaggagaagaggggaggggagaggagggaagaagaaggggagggagggaggggaggggagacgaggggaggggaggggaggggagacgaggggaagggaggggaggggagaggggaaagaaaaggaagaaagaaaagaccgagcccaggctctgcagttagaagcccctggttcaattcccagccatgccattctctggtttatgaatatgtcacatgacttcctttagaatcctgtttccttctctagaaaatatggaaataaaactgtggaagagatggctgcttgcctacctgttagcccttctccctttcttctagaaatagcctcttgtgcattaggctgagttgaaaaactactttgcccaatctcccttgcaggtaggggtggctactcagacgaaagcaggtcactgggtgcggcttccaaaagagactgtgtggctcttctcttgcgtcttctttctgctgcttggatcatccatgtgaggctggagctagcagctatattggactaagtgattttgaggatggaaatattgggctaaaagtagtgagtgaagcagaaaacataggagtctggtctctgattttgtagaattgccataccagccctggactaaaacctacctttccttccttccttccttccttcttttctttcttttcttttttttttgatagggtctcactttgtcacccaggctggagtgcagtgacaccatcacagctcaccgcagtctcaacctctcaggctctagtgatcctctcacctcagcctttttttttttttttttttaagacagagtttcgctcatgtcgcccaggctggagtgcagtggtgccatctcggctcaccgcaacctccgcctcctgggttcagtgattctcctgcctcagcctccagagtagctgggattacaggcgcctgccaccacgcccggctaatttttgtatttttagtagagatgggatttcatcatattggtcaggctggtctcctgacctcaggtgatctgcccgcctcagcctcccaaagtgctgggattacaggtgtgagccgccgcgcccgcccggccaacaatactttacatgaaccatgtgcacaggaaggagggcccacagcgccccccagagggcttccaggagcctgctgtgcacatcctttcccgtctccacactcagtgtccccacacgggtagtttgaaaggagcaaggtggaagtatttacgccctgggaatgggcatgtgctaaatctagacattttgccccctggagagcagctgttaaacatttaccatgaagccactttacagcacactagcaaagagtacggactattgcaccagactgccgggttcaaatcccagctcttccacttgctagctgtgcaaccctggaagggttacttaacctctctgtgcctcaggttcctcactattaacacaaggataataatagtatctacctcacagggttgtaaaccctccacaggaagctgctgctgtaattattatttttttaaggatggggtctcactacattgcccaggctggtctccaactcctggcctcaagcaatcctcccatcttagcctcccaaagtgctggaattacaggcatgagccaccgggcccagcctgtaattattattactatctcactgccctttcacagctctgtgaggtcaattttgtgattatatccttgttctgccaatgaggaatgggagccccagagaagtcagataacgtgcgcaagatcacaaagtagccggcaaagctggcactgagccctgggcaggggctttcggtgcaagcggcaaacccgatcacggcgccactctggggtggttgaagtttctgagccacagcccaggccagagaacatggagaaacaggcgggctcctgaaggcaagcccccaccagcctgccgtcctgtagcttatcatgagaggcaggctgtcttggctatagatgcgagggactcagctggaaaattctcacccgcattcctggcttgaatttaggtaaaaggcacagcccatcctgagctccaaggcacatcacggagttaacaaaatctcctaaacttgggggagggaagtcatcttgtctggcttccttggtaacacctgtcagatgctacaggccacggcagccacgaaaagtgggttcagtgacatgtttcacaaagaaggcagcagaggcccagagaggggaagccacttgcccaaagtcacatagcactggagctgagacccggagtatctgcccacccagatctgggtgtgagctcctttatccccctgtctcacacccaggcccctacaccccgagccccccacagcacctaccggagctgttcctcccccatgtagtcaatgtccagaggcttcttacgctcggagaggatgcgcaccttcatctcccgccccgtctgccgcttaccacgcttctgttctgcctgagggtgggggaggcggaacagtaaactgggggccacatcccacagagcactgccgtgtcgggacccacacgtcggatcccacagaccatttccatgttgggaccacaggtctgcaccccaggcccatctccttcagacctaggagtccagccccactccctcctccctcagattcaggaggagtccagacccccagtcccttctcttagactgagtccaagccccagaccctctcgcattaggaaccagaagtctggcccccagcccctcctccctcagcccaggagtccagaccccagcccctcctccctcagacccaggattgcaggccccgagcccctcctccctcagacccaggagtgcaggcccccagcccctcctccctcagacccaggagtccaggcccccagcccctcctctcagactgagtccaagccccagaccctctcgcattaggaaccagaagtctggcccccagcccctcctccctcagacccaggcgtccaggccctcagcccctcctccctcagcccaggagtccaggaccccagcccctcctccctcagacccaggcgtccagaccccagctcctcctccctcagacccaggagttcagggcccagcccctcctccctcagacccaggaatccaggcctcagcccctcctccgttaggaaccagaggtctggcccccagcccctgccccctcagaactcagacctcaggctcctgcaggctgactcaccttgaccaggtagccgccaaaatgggcccccatgttggacagcaccttctttttcttggcatcatcctctgcccgcttcttggcctcttcctcttccttcctcatcttctcctcctgtgggaagtaaggggttaacctcatggactcccctgtaggactgagggaggagggccctgggatgtggaactggggcacagggatcagcagacccagtgccgcagaggctgctgggacatcagaaccagcagaaacgcaggggtacccactcccggccctgccacgtctccccgtgtgaccacctacaagtcccttcccctctgtttttttttttttttgagacggactctcgctctgttgctcaggctggagtgcagtggtgcgatcttggctcactgcaacctccgcctcccgggtttaagcaattctccagcctcagcctcctgagtagctgggattacaggcacccgccaccgcgcccaactaatttttgtatttttagtggagacgcggtttcaccatgttggccagg[138 bp omitted]agaagaaatgcctgctttttctgcatgtctccaccctgaaatagccgatagtgaactctgctgtacgacctcactccagatgctcagcctgtctgggccacagtcgcccttagtctcaggatatgagaatgtctgttttgagggggtcaagggaagtaactggtgataagaccagggactggggagattaaagaggctgatggccttgagcctgaggaaggggttctggaatattgagcgaaggcattacgacattcgagaaactcttcattgaatgttccagaaacagtggtttgtccaggctgagccccgtctccttatggtggacatgaggctttttgtacacccagcactccgtacctgaattagtttcctttctgtttttgagatggagtctcgctctgtcactcaggctggagtgcagtggtgcaatctctgctctgttcactgcaacccccacctcctgggttcaagtgattctcctgcctcggcctcccaagtaactgggattacagacatgtgccaccattaccagctaatttttgtatttttagtacaaacagggtttcaccatgttggccaggctggtctcaaactcctggcctcaggtgatccacttgtctcggtctcccaaagtgctgggattacaggcgtcagccatcgcgcctaaacttagtttcctatcactgctgtaatttgcaaatttagtggcagaaaaacaatgcagatttgttatcttacagctctgcagatcagacatctgaaattggtccccctgggctggaatcaagttgtgaacagaaccaatttattctggaggttctaggggagaattcattcccttcccttttccagctgctgcctgcatgtctgggcccatggaccttctttcatcttcagaggcagccatgcagcatcttcaaatctctcagtctgaccctctggccttcctcttataaggacccttgtgatgatcttgcccttccccacaggtaatccaggacaaccttcccatctcaagatctttaatttaatcacatctgcaaaatccccttcacagctgggtgacgggcaggtggctgtaatcccagctactcgggaggctgaggcaggaggatcacttgagcccaggagtttgggaacaacgtgggcaacatagaaagaccctatctcaaataaaaaaaaataataataatagtaataatgatgacaatggccaggcatggtggctcatgcctgtaatcctagcactttgggaggccaagggggtgaatcacctgaggtcaggagttcaagaccagcctgaaccaacatggagaaaccccatttctactaaaaatacaaaaattagccgagcctggtggcaggtgcctgtaatcccagctactcaggaggctgaggcaggggaattgcttgaaccaggaggcggaggttgcagtgagctgagatcgcgtcactgcactccagcctgggtgacagagcgagactgtctcagaaaaaaaaaaaattaaaattaaaaaaaaagggaaaagaagaaaatggagaatccaggccgggcacgatggctcatgcctgtcatcccagcactttgggaggtgaaagcaggtggattgcttgagcttaggagttgaagaccagcctggacaacatggcaaaatgctgtctctacaaaaaataaaaaaataaaaaaaactagtggggcagagtggcgcagcctatatagttccagcgactctggaggctgaggtgggaaaatcatttgagcccaggaggtcctagttatagtgagctaggatcacaccactgcacttcagcctgggtgacagagcaagaccctatttccaaataaacgaataaaaaataataataggccggatgcggtggctcacacctgtaatcccagcactttggaaggctgaggtgggcggatcatgtggtcagaagatcaagaccatcctggccaacatggtgacaccccatctctactaaaaatacaaaatttagccgggcgtggtggtgcgcacctgtagtcccagctactggggaggctgaggcagaagattcgcttgaacctggaaggcagaggttacagtgagctgagatcgtgccactgcactccagcctgggcgacagagctagactccgtttcaaagaataataataatagtaataataataataataataataataacaaaatgggcatccggctgaagaagtaacatttgggctctcagggcaggggaggcacccaccgccagcttagcctgacgttcgcgttccttctcagttctgaagcgctgttgctcggctctctctgaccggcgccgctcctgggaaacggagaagcataagggggtgcagggacgtacccccagtcttccttccccagagtaggctaataaacagattggagtgtggccaccgacttgggtgaattcgcgaaagcctaaggctcagctctgtactaggaggaaaactattatctgcatctcccaagatgcaagggatccacatggagggaggaagaccggggggaacccggactctcggctcacaatgcgctccttcaaggcaaccagctcctcttcctccttcttccgctgctcgaaatgtacatcgatgagtgtctgcagctccagcaggtctttctccatgcgcttgcggtggatgtcctgcaggacacacgggcagcccgtcctaggagaccctggagggggcagcagcctcccagcacctcccccatgcaggatggtgaactgaaccgtttcccaggacggtatccagcaggtggcagcaatgcctcgtgtttgacactaatcagctcttccaaggacaggcttcccaaagacgggagtggggagtggggaccggcgcctttttttttttttttcctcccaggctggagtgaaatggcgcgatctcggctcaccgccacctccgcctcccaggttcaagcgattttcctgcctc[134 bp omitted]ctcccaaagtgctgggattacaggcatgaggccccgcgcccggccggcgccttttcatgattgacacaaaggccccttaaagactagcaactgcgcctgcggaggggtctcttgtcacttacatcgaagtcaacgcgctccccttctgggatctttggcgggatcaaaggaggcaccacggggcggctgagtggacagaaacacagagaccatgagtggcccgacctccctgagccacctcccacctccgggatgtgccgtccagtgaggtagccgccagccccgggaggctcctgaacgtggagggtcccagctgaggcgggctgtcagtgaaacacacaaaagaaggtaaaatacctcactactcatgtttttttggttgttgttggttttgttttgtttttttgacggagtcttgctctgtcacccaggctggagtgcggtggcgccacctcggctcactgcaagctccgcctcctgggttcacgccattctcctgcctcagcctcccgagtagctgggactacaggcgcccaccacc[138 bp omitted]cccggcactaatcatgttttatactgattacatgttgaaatgataaaacattatataacagattaaaaaaactgtgctatgaaaattaatttttcctatattgttgtactttaaaaaatatgcctagtaagaattttttttttttttttgagacagagcctcactctgtcacccaggctggaatgcagtggcgccatctctgctcaccacaacaacctccacctcccagattcaagcgattctcctgcctc[134 bp omitted]cagcctcccaaagtgctgggattacaggcaggagcccctgcgcccagccatttttaaattttttgtagagatggcgtttcacagcctgggcgcggtggctcacgcctgtaatcctagcactttgggaggccaaggtgggcgaatcacttgaggtcaggagttcaaaaccagcttgggcatcatggtgaaaccccatctctactagaaattaaaaaaaaaaattagctgggcatggtggtacgtgcctgtaatccctgctactcaggaggctgaggcaggagaatcgcttgaaccccggaggcagagattgcagtgagccgagatcgtgccatcgcactccagcctgggtgacagagggagactctatctcaaaaaaaaaaaaaaagagatggcgtttcactatgttgtccagggtggtcttgaacttctgagctcaagtgatcctcccgcctcagcctcccagagtgctgggactataggcgtgagccactgcgcccagcctttagtaagaaattgtaagtgacgtgtgtggcttgccatctatttctattgggtggtgccgctctgaggctcagccctcagcctgctctgatttcctgccacttccttggaattctcttttctgggtttctgagacagtgaagagcgattccaagatgaagcagacaggacttaggggatgctgggcaaggggagggaagaggtgaggacaatccccaagggtctctgggccagggggccaagtgtacagcagggccgtcatctccatcttggaaaagtcgataagctccatcagggcgtcatgtgtgggaataaaatatggcttaccatattgtacaggaatgaataccggcttgcctcccacccctctggctgttccatccctatctcctgccccgacagccccgtgagctgccagtgagctttccttttcccttttctcatcatcaatgccattcactccaatgacttcaggtatcatcaactgctgaggactcgccaactgtctctggtccagactctctcctaagccccagactcaagctaacaggtatctcctgaacttttcccaccttcccacacatgacgtcctgatggagctcaccaacttctctgagaaggagatggcagccccactgtccactttgttccccagcccagagacccttcggggttgtccccattgcttccctccccttgcccaacaatccccaagtcctgtccctttgccttggaatccctctcagtccattcccccaccccaccccaccccctttttttttttttgagatggagtttcactcttgttgcccaggctgccgtgcaatgacacgatcttgactcactgcaacctctgcctcccggttcaagcgattctcctgcctcagcctcccaaatagctaggattacaggtgcccaccacaatacctggctaattcttttgtatttttagtagagacagagtttcaccatgttgaccgggctggtctcaaactcctgaccttaggtaatccgcccccctcagcctcccaaagtgctggaattacaggcatgaaccactgcgcccggccccattcccttatttttatttatgttttagagacagggtcttgctctgttgcccaggctggagtacagtggtgtaatcatagctcactgcagcctccaaatcctgggttcgaacaatcctccttcctcagcctcctgagtagctggaatcacaggtgtgtgccactgtgcccggctaattttttaaaattttttgtagagatgtgggggatctcattttgttacttaggctgatcttgaactcctatcctcaagtgatcctcccacctgccgctgcgcaggcagagggcacagtgtgtgcaaaggctcaggggtatgaaagcacaggcatggctagagaaccatgaaacgctgtgtgtctgtcagtggggaaggcagatgccggaaaggtccgctggagccagatggggaaggctttgaatgcaggctagttgctttgactgcgtcttaagagtagtggggagttgaggaaagattctgagcagaggaggggcagggttagctctggtgttagaaaagtctctctcgagtcatggaggaggatgagccacaagttgtaggcagggaggccagagaggaggctggggtgatggtaaaggcgcgaggggaagagggaccactgggtggaaagaaggaaacagactggctgggcatggtggcttgcgcctgtaatcccagcactttgggaggccaaggtgggagaactgcttgaggataggagttcaagaccagcctaagcaacatagcaagacctcatctctacaaaaagaaaaaaaaaaaaaaaaaccaggtgtggtggcacatgcctgtggtcccagctactcaggaggctgagatgggaggattgcttgagcccaagatgttgaggcagtgggccaggattgggtcactgcactctagcctgggtaacagggtggagactatgaccacgatgaagaagaaggggaaggagaaggagaaggggaaggggaagaagaggaagtggaggaggaggagggaggaggagggagaggagggaggagggaaagggggagggaggaggaggaggaggagaaatgtcgactgctgtttcaatttcctccctccatctctgcctttctcacaccttgtctctgggggtagagggaatatttaggaagatgtatgactggggccccccaccctgtaggatctcaccttggtttggggcgttcctcttctgttggtggtgggggataaaaagagataattagcaagagtttagaggagaggggctaggcctgacacaccctggggagggaccccccaagcctcggcccccaggaccccagggaaggactctggagtccagttctggaggaggggggatggggagaagaaaagagggaaggaaagtcagggtggctgtaaaggaggaagagggtcacacgcatcagatatacattcagaactggtgtggggaccccccacccccactgtctgcacacccaggagtgcaaacccccagacctttctctatttatatgcccagagctcctgctctcctccattaggacccagcagtgcagggggtcccaacctctgtcttcattcagtgaccccagcgctctctccccagctcgccccctgcccaccgccccaccgcccccccgcccccggcccgaccttggagaccctgactcccagcgctcgcctcctctgcaatcctaaattccaagccccaacctttgaatgtatatgggggagaaaataacagacaaggttggaggcgaagataaggggggatggggtggtgcttctccgcaaacatccaacccttctgtaaagattcctccagactggggaagaaggcttgggtgtcggtccctttaagaaggaagggaaagggttaaagccactgcggggccatttcccttcccggccccgagagggcgcaggagctctcaggggcttaaaggaccgggcctgggggcgggttatgggggcggagggagggaagggtggtcttggaggttggggcccgaggatatcgggggtccccccgggcccccgacatcggtctcgggaagcgaagcagccgcggttacctggctctgccaccggctccggctcttcgggggctggggaggggagggaggagcagcgagggtttggggagcgaggggggagcggccacgcccgggcgcgggaggggagagagggaagagacgtgagaggctgttagaggaccgggagccgaggccgtcgggagccccatcccgccccctcctcccgggcccagcgtccccgcccccccaccccccagctccagacctgcggagtccgggacctcaccttcctcctcctcctccgcagcctcctctggagatgggggcacagaagagaaggcgttaggagctgggggagggatgggggcggtggccagagaccagggttccagtctctgctggacgggggtccctctggcctcggctgcgatgggcacgttccccctggcggtgcagggatggcgcgaggagacgctccagacccggagagggcgggcgagggcccgagggctgagccgccccttccccgccaaagtgccacactcctcgcctcccctcccaagagctcctgggcgtgtccccatcccatagggccggcccactccctactcaccttccggctgctccctgcggacgggtgtggggagagaggagggaggggagagttagacctggggtgggagagcctctccaccactgcacgccccaacccctcccagtgcagcactcactcctcatattcctgctcctcggtgtccgacatcctggtgcggcctaaggaccagagagaagaggcccagtggggtggggccccaaggagggggcgacctagactcctgggtgtgagggaggaggggctgggggcctggactcctgggtctggactcctgggtgtgagagaggaggagctggggtctggactcctgggtgtgagagaggaggagctggggcctggactcctgggtctgaggaaggaggggctgggggcctggactcctgggtctgagggaggaggggctggggtctggactcctgggtctgagggaggaggagctggggcctggactcctgggtctgaggaaggaggggctggggcctggacttctgggtctgagggaggagggactggggtcctgaactcctggatctgagggaggaggggctgggggccggattcctgggtctgagggaggaggggctggggggtgtgtgggagggtgggtgtggactcctgagactgagatgggttgtcctggacacctgggtctgagggaggaggggctggggtctggactcctggatctgagggaggaggggccaggggcctggacgcctgggtctgagggaggaggggccgcgggcctggacgcctgggtctgagggaggagggtctgggggcctggcctcctgggtctgagggaggaggagctggggcctggactcctggatctaagggaggagaggctgggagtctagactcctgagtctgagggaggagcgggctgggggcctgtactcctgcgtctgagggaggagggctcaggtctggactcttgggtctgagggagggggccggctgtcctaaagcatgcatgaggacagaccttggtaggtgtggtcctggcacagccaggaggctgcagaccctgccccctcagcacagctgtcctcttttgtcttatgacaagtccatgggaacctgatccagttgggattaggaagaggcatttgagaagggacagtggcctgaagacaatagctgccccacccccaggagctattttggggggatgtcatagatggtgaaaccgaggacatttcctaagaagggatttgaggaaggggggcttctgggagaattagtcacccgcatcccctctcccactcgccccaccccactggctggtttcctccccacctgtctcccctttcaccttcccatacatcacgtagggggcaggggcataaagggcaccttctgtccgtagacctcaccctgacccctacattcttagacctcaaagtctttgagacaccctaggccacagggtgcctagccccaaatcccaatacccacagattctgagaccccgatttatgatgcccgtgtttctgaggccagcaagtcctcacagctctggattctgaaatcccagttcttgatagtccagatatgggccgggacatcctaagaccacccccaggtcttgagacctcctaaaatctgaaacctcaagaatatgagacccccaaaatcttgatacccaaactcggaggcccagttcatgataccccagataatggcactctaagttttcatgctttctatcataatgtctcagattccgagccctccactaccaaaaccccaatttcttctgagacccccccaattcctgataccctcagagtctgaggccccaaatcctgacacccagattgtttgacctccaagtccagatatccctgactgctgagatttcccccagattcccagaaccccaagatcctaggaggttttattctgggacatccaagtcctggcagccccgggttaggatttgtgtaacccacaaatcctagtattttcccctctatcctgagtccccctaaagtctgagcctctcaagttcccagacctccagttgtatgccccacctacctctgcaccatttctccacacccgacatcttccccacctgcctcctgccccctcccccaaggacatggtttttgaagaccacagggctccgcagagccccttacctaggctgtgtctgagatgctgtgaatcttgaggctgagccttgctgagggcactgaagctccggggagtttatagctggaggctcgggcccgccccgaggggagagggagggggagagaattcctttgctcaaacacaagcctgggagttcagagacagccctgctgcccctggctccacactcagagtccagaagcctccgtgggcccctccccaaccccatgccaaccccatctgcatggcccaggagccccgcccctgctcccaccccacaccccaggctcccgtggtgctccaactacctcccttatagctccctgtgctttgacgtccccatgcccggcacacagtaggtccttggaggacctactaatgacacatgggctataaggaatgtttcctgttttcttctctctgttccctctttctatctaggtctctttctggacccccatttctgttgtctctgtggctctccatctgtgtgtctctgtgtgtctgtctctacttcttagtctcctcctctgtctctgtccatctttttgtctcctcctcccacccccacccctttgtctgccgccaggattccatcctggtgacaacaggcactaaagccgggaagcaggtgtggggagggggagggggagggtggggtgtcaattagggtgaaacctaccctccctccccacctccatctaacgctgatcttttttggtatccccctcccgcttcccagccaagccatgaccttgagttctaggttcaagccagccctggagagcaggcttcctcaccctccccgcctctccgtacctctgtctctggtggtctcggtctttgtgtttctgtgcatttctcggggccccttgctgggtctgtcttgggctctctctgcatctgtcgctttctgagcccctcagtgtgtttctcggcatgtgtctccgggtggttttgtctctgcatttctgtgggtgtctctgcatgtctgcccctctcagcgtttgtgtctgtgggggctcacagtctctctgtgcatttctgtccacctatgaccccatttctgtctctttttggctctgggtctctgtgtctgtgttcacgtctctatctttctagttctctccatgtctctcttagtgcccgcagttccccctctgtggctctccatttccatctcttatagggtctccatgtctctgcaccttgctgtgagtatatctctgtctctcttttctcctttctttgcacttccttctatgcatcttgtggtattttctccctctctctttgggtctttgcctggctcctactctctctactcccaactcagtctctctgttgtcggtcatgtctctctgcctgtctgtttctctgtgtctctctctctttgacctttagtcttggcatctctgtgcactccacatgggccagaggagctgtgacaatagagatcagaagactgatggaatgaactgtttgtggcaataagataccaaattataaacaagacctaaggccatgccaggcaagggttaagccacgcatccctacacttatataatcgactatgttccaactgccacaaggcttttcctttttctagcagctaaacaagcaccggcctcaagataagcaatattacaaccattgcagccatccattgccagatgctgactagctgaaccccctgttccacaaggcataactacagcattagttgaacaagagactgatttcagtaactttctcctgataagatgccgcagaccacggactggttctggctgttgacagaggctgtgcactgagtgtcttcatatccctgcttcgtgtttcgatacgaatgcattcaatggaatgcacttaaatgttaagcct[140 bp omitted]ggtgaaaccccgtctctacgaaaaacacaaaaattagctgggcgtggtggtgcatgcctgtaatcccagctactggagaggctgaggcaggagaatggcttgaacccaggacgcagaggttgcagtgagctgagatcgtgccactgcactccagcctgggtgacagagcaagactccgtctcaaaaaaaaaaaaaaatgagtgtttgcttgtcacacatgcgtgtgtccatgtgtccacctgtccatgaatattcatagctccttctataaccagttgaatacgtgcacttagctaacccactcagcataaattcctgccttgcccttccctcccttaaagtgcctgcttttgttttttggcaagaagccatgcttctggtcttcaggttgtgatccgcttcttaagaaacaaagctccgctctccaaattcatgaaccccgggattcttttcaataacacagccaagagtgcttcacatgggagacccatctggtccccaacctgctgtgtggctttgggggagccccacctgcagtcttcccatctgtctcctgcctaagccctgggtaatagacatggagtcactttcagctcagagagaagctttattcctcagggccctcctcagggcaggggcagtaggcaggaaggctcagctctcaaactttttcttgcggccctccattccactcagtgcatcgatgttcttgcgccagtctcccacctcccggttttcctggaggatggcgatgagtcagaggttagggtctcttcttggtctccagtctctcaagaatccctgtcttccctccagcctgtggggccactctaccctggatgcctaagtatctagttctggagcacttcctgtcttttcaagataatccctgccaattttccccatgcacttcctgtctccctcatgcacttcctgtccccctcatgcacttcctgtctttccccagcacttcctgtctccctcatgtactttctgtctttccccatccacttcctgtctccctcatgcacttcctgtctttcccctccacttcctgtctccttcctgcacttcctatctttcccctccacttcctgtctgccttatgcccttcctgtctccttccttctcttcttattatagtagtccctccttttctgcaattttactttgtgtggtttcagttacctgaggtaaaccatggcccaaaaatattaaatggaaaattccagaaataaacaattcataagtttgatggattctcaggtcaatagtagcctaacgccaggtcataatgcctatgtcatccacctcacctcatctcagcacataggcactgtcattttacatcacaaggaaaagaagggtgattacagtgctataagatattttgagaaagagaccacattcatgagttttattacaatctgttataattgttctattttattattattattatttgagacagggtctggctgcctcatccaagctggagtgcagtcgtgcaatctcggctcactgcagcctcaacttcctgggctcaagccatcctctcacctcagactcctgaggagctgggaccacaggtgtgtgccaccatgcccagctaacttttgttctgttttgttttgttttgagatggagtctcccagtgttgcctgggctggagtgcagtggtgagatctcggctcactgcaacctctgcctcccgggttcaagcaattctcctgcctcagcttcacaagtagctgggattacaggcacccacgaccacgcccagcaaatgtttgtatttttactacaggtggggtttcactgtgttggccaggctggtctcaaactcctgacctcatgatccgcccgccttggcctcccaaagcgctgggattacaggcacgagccaccacacccggtaactttggtattttttatagagacatggtctcgccatgttgcccaggctggtctcgaactccagagctcaagcaatctgcctgccttagcatcccaaagtgttgagattacaggcatgagccaccacgcccaaccttcttttgttgttatttattgttaatctcttactgtgtctaatttagaaatgaaactttatcataggtatgtatgtgtgtataggaaaaaaaattacatatagggttcagtacaatccatggtttcaggcatccactcctatctttcctgtcttcttctttaagatagggtctcactgtattgcccaggctggagtgcagtggtgcagtcatagctcactgcaccctcgatctcatgggctcaagcgattttcctgcctcagcctcctgagaagctgcatgccaccaccgtgactggctaatttaaaaaagaaatttgtagaaattaaaacaacaacatggtggtgtgcacctgtagtcccagctactcgggaggctgaggcatgagaatcacttgatcctgggaggcagaggttgcagtgagccgagatggtgtcactgcactccagcaaccgagatggtgtcattgcactccagcctgggcagcagagactccatcgcaaaaaaaaaaaaaaaaggaaattaaaaaaaaattttttttaaacctcaaagattacaggcataagccactgcacctggaccttcatgtacctctttgctcttacatggacttcctgtagccctaatgcacttcctgtcttccccttctacttcctgtcttcctcttgcatttctgaggaccccttactagctgcttctacctccaactccaagcaccatctgccctcaggcctagggttgttggcacccacagcccttcccctcagcatcctctttcctggccttagcccacactcaccttctcggtgtcctccttcttcacctgcttgaggtgggcccgcaggtccagggactccttagcccgggcccccagcagcgcctgcatcatggcatctgcagagatcctcactctccgcagggtgggccgcttaaacttgcctcgaaggtcaaagatcttctgagtcagatctgcaatctgggggcacacgagggggtgggtacttctccttccatttcccgcacacccaactcctccatcctacactccttttttattctccttatctcgtcttccagtaccgaggccttaccagtctcttcccggcttaggctcccagtctaggcttctaatcctggaactgaatccccctcctcatatgctccagcctcacctctcaaaaccactggcataacctggtccagctacatgcaaatcacaattccctggccagtgcctgagctaatttaccaacatgtgatgccctgagcatgttcactaacttattttctgtttcccaacccatggccttgcatgtgctgttccctctgcctagaacagctttccttgactatattgtactcatccttctgccccagccctgccaggctcacagttgtcctgggtctcctgggatgtgcagccaaaagcagctgcaaggggtcaggcagagaccaagtcccagccatctcaccctaccccgaaggtacccgagctgcccatgcgtcccacctccgtgatgttcttggtgacttttgcctctatgtcgtatctctcttcatccaccttgtccacacgggcgtggagctgtcggcacaagtcctggaggaggaacgtggtgtgtgttgttgggggaaccaaaaacagggagacctggactcctgggtctgagggagaaggggctcggggcctggactcctgggtctgagggaggagaaggggctgggggcctggactcctgggtctgagggaggagttgggggcctggactcctgggtttgagggaggagaaggggctgggggcctggactcctgggtctgagggaggaggggctgagggcctcgattccagggtctgagggaggaggggctggggactggactcctgggtctgagggaggaggggctggggactggactcctgggtctgagggaggaggggctggggcctggacttcagggtctgagggaggaggggctggggactggactcctgggtctgagggaggaggggctggggcctggactccagggtctgagggaggaggggctggggcctggactccagggtctgagggaggaggagctggggcctggactccagggtctgagggaggaggggctggggcctggactccagggtctgagggaggagaggctggggcctggactccagggtctcagggaggagaggctggggcctggactccagggtctgagggaggaggggctggggcctggactccagggtctgagggaggaggggctggggactggactcctgggtctgagggaggaggggctggggcctggacttcagggtctgagggaggaggggctggggcctggacttcagggtctgagggaggaggggctggggcctggacttcagggtctgagggaggaggggctgagggcctcgattccagggtctgagggaggaggggctggggactggactcctgggtctgagggaggaggggctggggcctggactccagggtctgagggaggaggggctgggggcctggactccagggtctgagggaggaggggctggggcctggactccagggtctgagggaggaggggctggggcctggactccagggtctgagggaggaggggctggggcctggacttcagggtctcagggaggaggggctggggactggactcctgggtctgagggaggaggggctggggcctggactccagggtctgagggaggaggggctggggcttgggcttctgtctgggataggagggccacatggtcctgaaggagtaggttggagccaagactccacagacctgcacacaaagggtgttaggggccaggagtcccacgaaccatatataattgggtaaggacagccatattggacgcctgggtcccgagcagaagaggggatagaggctgtactgctgaattccgggactagaaacctcgcatccttgggagccggtacctgcagctccgcgaagcccagcccggccaactccagcggctggcagcgggtgctcagagcgcgccccttctctccgcgccgctcctccgcctctcgctccagctcttgctttgcaatctgcagcagcagagtctgcagaggggtgggagggaagcgcagcccacccggggcttcaggataaagaccaggcgtggggaaccgcctctgcccttctaaaccctccagtttggtctccactgttccaaggccccgtcccaccccgagcagtactccccgctaaagccacgccccgagcggccaaaccccgcccacttccgcccacctaccccgaaagccccacccattctcaagctccgccccctgagcacctgcctgctctttcccagtcccgcccgtcctcaccttcagctgcaattttctcgaggcggagatcttagattttttctgccagggtgagatggagcaaggaaggatcatggagggggattcggagacgacggtggaggggacctcaagacacccccagcaaacccagccggtccagatttgggcccacgtccaacttgagccctgagtctacgggaggccacgcccctcattcccatccaccaatctgggtctcttcctttggataggcacttcccatctatccctaagcaagtccgagggcaacggagttccgcccgcaggctgctgtcaccaatccgagcatgaccctctgcaaaactccgcccctgaagcccctccgcgtagtccccgcccccttcgcagccctggctcctccccccactcccagggtcttggatccctccggcgcctgtactctgcccccaggaagccccgtcccaccttggcgtgcggctccgtggcataagcgcggtagttggaggagcggcgtctgattggggctggtgcagggcgaggttccctagcctgggttaggaggagtggggaccccatcaccaccaagaccccacccagcccttaccgtaccgcaccctctgctagggctgcagcctcccgccccagacccctcactgcagcgcccaccctggccctgggggtcccagccacgccttagcccgctgctctcaccgcatcgctgctcctggaaggagagaaaccaaggaggggggttagtggtgggctgtgtcctgtctcctaagggacccctggagtcccctctgaacaagaggtcgggggaccgcgcttccccttccttgggttccaggagtctgactcgcaaacccacttcctctcttcacccaagagtccctacgcctacctcgcaggccaagggtccagcctctcagctgcgacccctcttgggaacccgggaggtcgcccccaactcccactgccttggggcatcactcacccatccgccatgctgagactcaggccgggaatggcaggaggcagggcgaggacaggggcgtttggagggtcagtgagggggccgcccgggtgaccttcagggtcccagggaccgtcagtctcctccgggctgcttgagactccccgaggacactgagataaagggcgaggacacagactaaatatactgtcacctcctcctccccctgcccactatgccagataacgggggcgcgtgaggggcggggtgggccctgctccagctggatcaccagccacctccgggcacaggaatccggaccctcctccctctgatcctggagtcctagacccctcctccctcagacccagagaatgcccgacctcccaacctcctcctccctcagtcccaggaccctgggagaccctggccactccctcacacaaggagtccaggcccccagcccccttttccctcagactcaagtgtctgggcccccagctcctcttccctcagacccaagagtccaggcccccagcccctcctccctcagacccaagagtccaggcccccagctcctcttccctcagacccaagagtccaggccccagcccctcctccctcagacccaagagtccaggccccagcccctcctccctcagacccaggagtccaggcccccagcccctcctccctcagacccaggggtccaggcccccagcccctccctcagacaagggagtccaggcaggcccccagcacacttcctctctcagactcaagagtctgcaccctcagctcctcctccctcagaccaggagtccaggaccccaatccctctcccctcagaccgaggagtccaggaccccaatccctctcccctcagacccaggagtccaggccactcaataaatgttgttgattaatttgaggatgcagctgtgctcggggctagctctcagtcaatagcactgggaaatccatccctcgtccacttggaaacccaggaatctggtttctggcttcctctgtccagcactcctgggcctttctctcccagccctggagacggacataggacaggaaagacgcttggacacacagaagggtggacacaacttgctttacttgaaccatctgggtgctgaccaggccctggtgaggagacaccccagcccctagtcagccacagggtgcctgggaacaagggggccaaagtcaagggcctgagactcagtgtcagatcctaggctgggcttagagcctcagaagtggaatttggaattctgagagaacaatctagaattctaggaatagaccatagaatctcagaaatggaatttgaaagtctaccaacactcccggggtgggggtggcgggtactgagtgggaatgattagaataaaattgaggactctagcagcggacttagaatggtatcagcgggttctcatcctacaacctgactttggaagttggagataaggggtgtctaggggttgggtcagactccagttttggagtctgactcacagttgggcggagccaaggccccctgaggctgagccagaacctctgagagtgaacctggagactcagagggcagctggcagggctcacagtgtggggtcccaccctgcagaggctgggtcaggccctcaagggctgggttgctggcttcaagaggctgggccaggatgtcaaggggcggagttccgggttccacagctgggacagtgttgcccagagctgattcctgggacttgcagaaacgtgcgaaggtctctgaaggcctggccccggtctgtggagcaaatccagctgcctgagctagctccctgacccgggtgttgaatccctgcagctgctcctgccgcacgtccaccaggtacctgcagatgggaagcgccctgtcagggacccagattttgatccccagccaggatgttccccaccctccaccccactgactcaccgggctaattccacaatcaagttccctccgggtgccacacaggccccaagctcagggatgagaagatggaccatactgcagagaggacggaggacaggctgagattcagctccaaatccggagggaggatggggctctgggatcccagacaatgagggaggaggggtggcaaaactggagtctgggtcctggggaaagaagggagcaggaggtctggactcctgggtctgagggaggaggggctgggggcctggacccctgggtctaagcaaggaggggctgggggcctggactcctgggtctgagggaggaggggctgggggcctgatcctgggtctttgtgagcacagctgcctccccgcttacccacaggccacatagaggagctggaatcggccgttgtagcagctcttgtggtggagagtctgagcagaattgagcggcaggaagtggacggtgaaagattccggggtcggggctgctgggggaaggggatagaggggtcacctctgacaggcggagccataagggcggaaaaccagagagatacacagagctgggcagagctgggcaggcacacaggacttggagataacactttttgtcctcttgcagctttttaaaaaatcctctaaggtaggctcctggaaagttctgggaaggtcagcctggcaggcagagactcactgtacagatcaggcaactgagactctagagagggaaagagggtgggtggccagggccacatgtgacatgccctgtcagacagacacgcagggagggccaggttggaggatggctggaaggaggcccagccaggatccagggtgtgggaggctgtccaagggggagctgggacccagcaccctgtgagaatattcttggatagcttagccctctgcagataagattagaattctgctagtggaattcagaattctaagcatgctctcagaatttaggaaagggagagaaagagagaaaaagagacagaatatcaagaagccgtcacttgcccaggcattccaaatcatgtcagtccacactccagtgtgaaacacctggaggctggagtccctggcttacctgttgttgtccctggcttacctggagtccctggctccgggcttccctccgcgtgctgctgctcctccaggtcccccccggtggctctcgcgcgcccccaggcggccacgtcgcggagcagctccgtcacgttgtgttgagtgatctccccggccgtctaacagtagaaggggcgtggccagacgtcggggccaggatggcggggcggggcttagaacgctgggagtcctcggtccaggactagaactcccgcagctgcttggaggatgtgaagtggggcgggacctatcccgcggggatggggcctgttctctgaatggagtcgttcccaccaagcgacgggcggggtctggagctgggggcggggcctgctgtgggggcggggccttgcgcacccaccgacccccagccccacctctacccccagtcccagcctcgccgcgcaccttgactggctggccgttgctcgtccgcaggaggctctcgtcgtccgcttcgatgccgaaggccacgaagggccccgtggcgatgtccccccagtacccgcgcgctgccacgcgctccccacgctggaaaaggagggagagaggaggcaggtgaggtcgatgttggggcccctgactcctaggactccgagcagcagcagtgggccaggacaggcagtggacacgcacgtagctcaggaggcgaccggacgccagggtccggttgggcacatgataggcgctggagtccctgagttcaaaggcgacgcctgtgtcccgccagcgtcggaactcctgggggtgaatgacttgagcctggggtggggggcgggaagaagggagccctcagtgaaccgagcgtggagagacccctacaccagcctccctcagacccaggagtccaggtccccaggccctcctccctcagacccaggagttcaggcccccaaaccctcctccctcagactcaggaggcccccagcccctcctccctcagacccaggggtccaggcccccagcccctctcctgggcccctcaccccgcggtcatgcagcttcatgcgcaggtcccagtcgctgacaccgcgccgggcgtcgtagcgggagcccaggtagtggcgcaggcgcgagtcccagaggcggctcatggggaacgcctggggccctttctcgccgccagcccagaagcggaatacggcctccagggcatcccgctcgcggaactgcggggccaggcacgcggtgggacagaggaaggcagagagggatgcagggagagcggattctaattgaccctctcttccatcccagaacaggggaacgattcccccgtttctcggatggaaaaactgaggctccgaaagcagaagccacctcctgcccccaggccaaatcccacagtgggagtcggggaactgggattcgaaccccctagcccgccgcctgctccatcaacgcacgtcctttggactgtgcgcttccattattcccgcggccacccgatcccagatggaggccgggcggcggcaccttgagggcgcggaggctgagccagggcagctgttcctccaggcggtcgggctcggggaccaggtgcgccagcaggtcggcctgggcacgcacgaaggcggccactggcgggcgcagcagcgcgttcccccacacttccaggaaggtctcgcttcgctctacggagagagggagataattgcgggaatgtgtggaggagggagcccagaaattacacccttaatatgttattatgtcatagtcatctaatgaaaacaatgaacccccgcaaactccccacgcatcccaaaaactacatgaagaacagggccggacatggtggcgggcgcctgtaatcccagttactcgggaggctgaggcaggagaatcgcttgaacccggaggcggaggttgcaatgggccgagatcatgccattgcactccagcctgggcaacagagtgagactccgcctctaaaataaataaataaataaccacctagaagagggaattagagttgcagattccacactcaccgcagacagagaatatttgggggaaaagataacaacacaacagtaaaaaataatacaaattgtaaaatatggtgtaagcatttacattgtattacatattataggtaatctagagatgatttgcggtgtatgggaccatgtgtacaggctatttgtaagtacatcttttttgttttgagacagtgtctcactctgttgcccaggctgaatgcagttgtgccatcatagttcactgttacctcgaccacctgagcttaagggaccctcctcctccagcttcccagctagctggggctaggcattagctaccacacccagctaatgttttatttctttttcttttctttttcttttttttttttttttttttttttttttttgagacggagtctcgctctgtcgcctagactgtagtgcagtggcgcgatcccggctcactgcaagctccgcctcccgggttcacgccattcttctgcctc[373 bp omitted]caggccagtctcaaactcgtggtctcaagcagtcctcccacctcaggctcccaaagtgttaggattacaggcgtgagccaccgcccctggcaatactatacaattttataagggacttgagcatccttggatcttggtatctgcaggggtcctggaaccagtccccagtgttactgagggatgactgtatatacctttgcatataatatatatacacatagacatacaaatagtttcatgttagttgtttaagaacttaatagaagagaactatgtgcctttagtaaaatagatcagtttagttctaactgtttaagaactttgaacaatctgtactgtgcaatgtactctgaattccctgggtcattaatgactgatatggtttggatctgtgtccctgcttaaatctcatgttgaattgtaatccccaatattggaggcggggcctggtgggaggtgattgggtcacaggggcagatttctcccttgctgttctcgtgatagtgagttcccacaaaatctggttatttgcaagtgtgcgcctcttccccactgcctctcttgccccttttcctgccgtggaacagatgcctgcatccccttcgcctcctgtcatgattgtaagtttcctgaggccttcccagccatactccctgtacagcctgtggaactgtgagtcaattaaacctcttttcttggggccgggtgtgatcgcacccgcctgtaaacctagcactttggcaggccaaggcgggcggatcacctgaggtcagcatctcgagaccatcctggccaacatggtgaaaccccggctctactaaaaatacaaaaccttagccgggcatggtggtgcatgcctgtaatcccagctacttgggagactgaggcaggagaattgcttgaatccaggaggcagaggttatggagagccaagatcgtgccattgcactccaatctgggcaacgggacaagactctgcctcaaataaataaataaataaacaaacaaacctgttttctttttctttctttcttttttttttagatggaggttttgcttttgtcgcccaggctggagtgcagtggtgtgatctcggctcactgcaacctctgcctcccgggttcaagtgattctcctgcttcagcctcccgagtagctgggactacaggcgcctgccaccaca[132 bp omitted]acccagcctctcctggaattttctaagtggctctaagatgtattatatttagccccattttacaggtaggaggagctgaggctctaagatggcaaattacatcagaggggaccatcatcaataaatatattggattttttttttcatcagaggtaccacactggaaaataccaaacatttttggtttttagatggagtttcgctctcttttttttttttttttttttttttttgagacggagtctcgctctgtcaccctggctggagtgcagtggcgcgatctcagctcactgcaagctccgcctgccgggttcacgccattctcctgcctcggcctcccaaagtgctgggattaacaggcgtgagccaccgcgcccggccggagtttcgctcttgttgcctaggctggagtgcaatggcgcgatctcggctcactgtaacctccgcctcccaggaaaataaccaaactttttaattgtaccattgaaatgccagaatccctctagggagggggaggagaccagcggtcagaatgcctgggtcctagcaacagaccttgcagccccatcttctccggttcctccagggctaggctgaagatcagcatgtgtcgggccacagcttccagattattctccagcacaaagaactagaaggatggacagggcagaataattctgagacctgtttgcctgggtcctaggagacccaggagagcaggccctcagctctctccttccacacacccgagttctgtacaccagcctcttccttcaaacacagaagtctgtgtccccagagctctcttcccttccattactcagaagacctcatcctcgagctcttccccactatagaacccaggagttccaaaccccagccccttccttcccccaagacgcatcggttcgctcccagcttctgcctccctcagatctaggagtctccagccccttcattcctggacctgaggttttagaatttcaatcccttcctccctcaaggactcgggaatctgggctctcatcttcatcccagctcacgttgaacctcctgcgaggccagaacttcgctcgggacagggtccgcagcaggtgccgtccatccacagagcccagaagcagcacatctagctcggggttgctgtgcactgtatcggcctgggagtctgggtccacaggaggacctggcaagatgacagctggctggggcaccatggtggttggcagagcgtccaccgtagcatcccctataaaaaatggactacaaatcccagtaggcgttccgcccgtggcctaggttctaaggggaggtgtttcctctgagtattctgggattcgcagtccgcagacaggacctcggggctgcccctgggagcgcgccctctgccgctggagcgttggagaacgttagcgccccccttgccaccgacgctgggactacgagctctaaaaggccgtctgctcaggctgggaaggcagacggtgtatcagaccttgcgtgctgggactcactttcagcctgcaggtccagcgccggggacaggccccaccaggacacggagccgaagccgctgccggagccggcaggtgtggtcatcaccctgcggaaaagacattctgggaatcgcacacattgcccgccccgctcccctctcaccgcccctcacttctcgcccctttgcctccacatgataccttgcccacacctttatcctccaaatatcccgggacgccccttcctctctgctcagtgcagcactgtggacccgcggcactccacaaccgctgcccagagtccccgcccttttcgaggaatcaagcaatggaagcatgtgggatgggaccacagcgagcaactgaccaatgagagtgagcgaggcccgccctctacaaacttttggccaatgggagcactgagggccagccttcccccacacctaggagaagagggcgtgtggacgcggttgtcatgacgacggcgccggcgggggaaggggcggtgctagaacaggttggggcggagtcagggtcggtccaaatttctggaatgggggaggcctgggctgattaaaattgagagtgaagggagcttaatcttatttcttgttttttgtttttttgttttcttcatatgcctttgctcatacgtaacggaattttcatcaattcaaataaagtgaagtgtctagactttagatggcaggcttctgagcccgctccccgccccagcacaacgtgggctctaccacacagaacagcccacaggtgggacactgatgtgcaggtcattaaaaattcagggatttgtgagctggttattgttacacgaagccataatttaaacttacagctagatccttttgtagtttctaagcgggatgattgggtgttcacgcgcatgcgtgagatgtgcctccctcaaaccttgttacgacatcggcacattactcttctgacatgaacaaaaaaattacaggtaaattctgtaatcgtacagttaaatcaactgcattaaaataagggtaagtcggccgggcgctgtggccacgcctgtgatcccaacactttgggaggtcaaggtgggcagataacttgaggtcagaagttggagaccagtctggccaacatggtgaaaccgcgcctcgaccttaaaaaatacaaaaattaaccgggcgtggtggcacgcacctgtaatcccagctactccggaggctgaggcaggagagtctgttgaacctgggaggcagaggttgcagtgaactgagatcgcgcctctgaactccagcctgggcgacagagcaagactctgtctcaaaaaaaaaaaaaagaaaaaccaaagtctgaatgaggcacatctctagatcaccccagcacccagcactgggctcagcgcccaaggggacttggctctctgcctcctctccttgcccagacacatgagcttagaccagtcaccctttctgagcctcagtctgctgctctgtgaaatgggaatgtagcgtgcagcgggcagaggtgcagcggatctgcctcctgagggcagatctgggcactgggaagacaatacctactggggaaacgaaggttgagacctcagacattcctgcagaatcaggctggctaaccagccccttccaggccagctctaagcctgcaagagccccagatcctgggtttctctctggagaattaatgcctttcctccctatttctcccactctcccaacaaattctcagcaaaggaaccagagtgacattttttttttttgagatggagtcttgctgtgacacccaggctggagtgcagtggcgcgatctcggctcactgaaacctccgcctcccgggttcaagcgattctcctgtcccagcctcccaggtagctgggactacaggcatttgccaccacaccagctaatttttgtatttgtattttattttgtgtatatatatatatatacacacacaaaataaaatacaaatatatgtatatatatttatatatacacaaaataaaatacaaatattttgtatatatatacaaaataaaatacaaatatacatatatatacatatatatatatatatatatagagagagagagagagagagagagagagagagagtttcactcttgttgcccaggctggagtgcaatggcgcgatctcggctcaccgcaacctccgcctcccgggttcaagccattcttctgcctcagcctcccgagtagctgggattacaggcaggcgccaggacgcccggctaattttgtattttttgtagagacagggtttctccgtgttggtcaggctggtctccaactcacgacctcaggtgatctgcccgccttggtctctcaaagtgttgggattacaggtgtgaaccaccgagccaggcgatttatttatttattattttttttttagagacggagtcttgctctgtcgcccaggctggagtgcagtggcacgatcttggctcactgcaacctccgcttcccgggttctagcaattctcctgcctcagcctcccaagtagctgggattacaggcgcacgctgccacgcccagctaattttttgtattttagtagagacgaggtttcaccgtgttgcccaggctggtctcgaattcctgagctcaggcaatccacctgccttggcctcccaaagcgctaggattacaggcgtgagccaccgtgcccagctccagcgattcttttttatttttagtagagacggggtttcaccatgttagccaggctggtctcgaactcctgacttcaagagttccgccggcctcagcctcccaaagtgctggaattaccggtgtgagccactgcacctggcccagagtgatcttaaacataaatcaaataatgtctcccacctcttcaaatcctccaaagtcttcccgctgcacctggacacattccccgctccttagcttggctccctatgccctatgcaatctgcagtcatccacccctgaagccacatcagcctcctggctccttggagaacacaccaagccgtttgaaccccagggcctttgcaacttgggattcttttgccttaaattatcttccccctcatctttgttttctatatatttatttttgagacaaagtcttgctctgttatccagacttgagttcagtggtgtgatcatagctcactgcagcctcaacctctcaggctcaagcagtcctcccacctcagtcccctgagtagctgggaccacaggcaagtgccgccatgcccggatatttatttatttatttatgtagagaaagggtctcactagttgcccaggctgttatttatttacttatttgagatggagtttcactcttgttgcccaggttggagtgcaatggcgctatctcggctcactgcaacgtccacctgccgggttcaagccattctcctgcctcagcctcctgagtagctgggactacaggcatgtgccatcacgcccagctaattttgtatttttagtagagacagggtttctccgtgttggtcaggctggtctcaaactcccgacctcaagtgatccgccggccttggcctcccaaaattctgagattacaggcgtgagccactgcgcccggctgtatttatttatttatttatttaaggcagggacttgctctgttgcctaggctggagtactccagcctgaaactcctgggctcaatcgatcctcccacctctgctccccaagtagctagaactatagccacgtgccagcatacctagctaactttacaaattttaaaaatagagaggttatccaggctggtgtctaaccctgggccccaagcaatcctcctgcctcccaaagtgctaggattaaggcatgagccatcgtgcttggccttgttttctttttaaattggtgtaaaacacacacactattaagttgattgggaatgacatttagtacacttgcaatgctgtgcaaccatcaccactgtctaattccagaactttctcatcactccaaaagaaaacacgtaccccatttatctccccatttctctctcctctgtccctggcaaccacgaatctactttctgtctctatgtatttgtcagtgcaggagatttcttttggatggaatactgcactatgcagccttctgtatccggcttccttcacttggcataatattttcaggactcatctatgctgaagcatgaatcaatgctttcttctgtttttatgaccaaataatattccactgttgttctccctaacctttgcaagcttcgttccttcttgtcattcaagtcatggcccagaccgcacctcctcagcaaggctgcccctgaccaccctccctaagttatgtcagcctttttacgttttggtcccagtgtggacggccatttgtaatggttttattcttctatcgctctgctttcttgttgagacagagacccaaggaccccattgccatcatctaaatcaatcccaggatttagagacaggctctctggctgtgtgattctgagcatttcacaggaattctctctctctctctctctctctttttttagatggagttttgctcttgttgtccaggctggagtgcaatggcgcgatctcgactcactgcaacctccacctcctgggttcaagcgagtctcctgcctcagcctccctagtagctgggattacaggtgcttgccacgacacccagttaatttttgtatttttagtagagacagggtttcagcatg[136 bp omitted]tgggaataatgatcatgtttatttcatgagtttgctgtgaggattattattggcagtaatagtagtaacataaagggctgtcttcataaagacatgctctacagccacacacacacacacacacacacacacacacacacacacactcacacacatgaaaagttactgaattcctttggagaaaaattaaaaatctcatggatattataatctgtgtagctgttctattttcactttcccgattggctaccaggaagcttaggagcaagtaagtttgtttgctgcctccttttttggtacgtgggggtaatttttgcctcattctccacttaatctgctgctcagagagttctctggccaaatcttataggtctttgttcaccacccaaaattctgtatgggatgagataaggtagaagccaatggaactatcatctttgctagaaacagagtaggaggcagcattcgttgaaagaacaatgaggtcagatgcggcggctcatgtctacagtcccagctactcacacaggaggattgcaggagtttgaaaccagcctgtgcaacatagcaagaccccatctctaaaaaagaaaagaaaagaaaagaaaaaattagctaggcatggttgcatgtgcctgtggtcccagctactcaggagtctgaggcaggaggatcccctgagcccaggaggttgaggctgcagtgagctatgattgccccaccgcactccagccagggtacacagagaaaccctgtcaaaaaaagaagaaagaagaggctgaggcagaagaatcgcttgaacccgggaggcaggggttgcggtgagccgagattgcaccattgccctccattctgggcaacaacagcgaaactccgtctcaaaattaaaaaaaagaagaagagaagaaaagaaatagaaaagaaaagaaaagaagaagggccgggcgcggtggctcacgcctgtaatcctagcacattgggaggccgaggcgggcggatcacgaggtcaggagatcgagatcatcctggctaacacggtgaaatgccgtctctactaaaaatacaaaaaaattagccgggtgtggtggcgggcgcctgtagtcccagctgctcgggaggctgaggcaggagaatggcgtgaacccgggaggaggagcttgcagtgagccgaaatcgtgccactgcactccagcctgggcgacaaagtgagacttcatctcaaaaaaacaaaaacaaaaacaaaaaaacaaacaaacaaaaaaaaaacaagagaaaaagaaagaaaaggaaagacagaaagaaaacaaaaaggaaaaaagaaaagaaaaaagaaagaggtgaagttgaaatcattggctttccttgctgaactccaacctctctcgcaggctctggagattgtattccctggctccgcgcctctcctttgttttgatggcagtaagtcgcttggggggtcaggtctgtgtttggatattctggggccccagcactcaacagaagacctcagggaatatggaatggaaggaagaaaaaaaagagagggagggagggatgcagaaatgggtatgaaaatcgatgtgagtcatgggtgagcaagcgagtggataaattcatggacaagcaagggagttctcgcggactcctcacagccagcgtgtggcaggaattattattatcccaacattctccagaggaggaaacccaggctcagagtggtgagtgaggaatgaacgggtgagagtgtgagggagtccatggggtcaggccagtctctcagaggctttcaggacgaacagcactcacaccgccctgcgagcgcccattcctggaaacgaggtttcctcttgggtcccagcccttgcccacccccatcaaggagcatgggcccaggccaccggagctgctgaatatttatttggccccaggagcagtgcagggatgggctgtgttggaagagagaggagagcagacgaggatggctgattgtcaaagcagggggcaggacccgggggcaggagaaaccaggctgccttcccttcccggggtccctggggcatctgggtgtgtccgcgagggtcgggggagtgtgctggaaagttgtcgtgattggcatcgttgggggtgagaagacaggaatggttcagatggttggggtggaaggtggggggagggtaaccgtcagaggaagcttaagggtggggctggcttggctttggccggtctcgggagtctggggtcaggggctagagtccaggcttggccgggggcttggggtgggagtcagggcgcaggcagcagcctcactcggtccgggggccgcagcgagtgccactgggcaatgggccgccgcgggttggccagcatgtccgcccagtgccgcaggccagccccgccggcggccgcccccacggccaccctcccgatggcctcgttcttgcccagcttgtcgtagtccagcacggtcagctccacctgcaccttctggggtgggcgcgggaggaagaggagagaggagcgtgaggggaggaggccccggaaggggcggtgtccgttttcacggctgagggtacctctcgctgccacccgagggctcggggccccggagctcgggacgggggagggggtgggagacgagagggacggagcctgcggcgaggaggaggctctggcgcctttcttcctgcgcagccaggtttctaaggaaatgaaccctcaggactcggttgcggagcgggtgtgttcggcgcctcctgggggagcagcctcctaagagccgcaaagctgcagaactttaacaggggccgggctagggtaggcgccgtccctaaagaagtgaggggaggtctctttttcttagaaccacgttcctgaggagggcggggcatcctggtcctgcttagggtggggaatctggtcccgcttaggagtggggcatcctggtcccgcttgggggcggggcatcctggtcctgcttgggggcggggcatcctggtcctgcttgggggcggagcatcctggttccgcttggtggggcggggcatactgatcctgcttagggtggagcatctggtactgcttaggggtgggacatcccggtcccgcttagagcagataggacacccacacccaattttaaggagtctcttcctggagtggaagaggcttcctggtcctcataggaggaaacagactgagagcataacctcagaccccctcacctggtttctagggagatgctaaaaagtctccctccgcctagcaatggcgattactaaaggtctgggctcttggagaagggcaggtttgagctcacctggacttggtcacagggcacctcgaagctgaaagcttcgttgtaataggggttcagagtgttcttcttgatggtggttttcttcttccgcacctttttgccgccctgcagcaggtggaccttgacgtatggatctggggagaggaaggaggagtcttatagctccccactgctgggttgttggaccaacatagaaacactgcctacacccttcgggtctccctagctctatgccaaaatccatgccttccacagcagccaggtcctccctgtccccgaagaaaccctcgaggctcagaaactgtcagaacgagaacccaccccacgccatccccacacaccccactcccttgcttcccacacacctgacagtcctcctacgtccatcttcttcaggtttttagcctccaggacgatgacggtgagcttcccggccgtggggacatagcggagggagaagcagatgtccccaagcttctcctgctgaaaggagaggggcccatcaccagagccccggctccacatccatgcctcctcaggggtacaatccacgccgccctgagggtctggaaagcctatgatctgattggctcaggatgttgtgggcgggactgggcctgggggcgtggctcggggcgcgaccgcgcatgctcacctcctcccgcggagccgcctgcagctcccgccaggcctgcactggccgccccaggtccacggagctcatagggacccgcacctccccgatggcgtcattgcgagagaagcggtcgaagtcgtacaccgccatgaccagcaccctgccccccagctccacgtaggggacctggagtgcacagagaatccgcagtagagagcaggaagtcagagatagggtgaggcacagcacaaccagaaggaaggcatggagtgaggcagcgagggtcgaagcgaacagttgggggaactcaaatgggaaagtccagggatccatgcggaaaaaaatcacgggtcagtggaacccaaatcgtaccgcccaaggaccaggctacagcccaggagtcagtagtgcccagggtccagtggaatagccccagagctggtagctgccacctgagctgtggccgcctccaggaaaagcggaaggggtcggtccctagtgttccagggactgggcacaggctatggaacacggggcctgaaggcaggagctcaccttgaaggcgaaggtctccccaaagtgagggttcagcgtctgccgatgcaccttggtctcgtaccgcctccgtttgtccggcagcaggtagacccgcacataggggtccgaggagccaccaagatccaaggctgccaatcccattgcttgcagaatgcccaccagcagctgcagggcccaggcacagtgggggaggtggggaacactagtcttagcctcccttccatggctcctttcagaaggggttggaacccccgggatcctccctccaaagcttccccttcctccacacccacctggccactctggaagtcataatccagggagtactgcagtcgtcctagctcatgcttgtctgccacctgctgccctggcccggatggtgctggctccagctcctctacttctggctgcaccttaaggagccaggggtaagggtgggtgaagtcttcccctgatagcagtatccatcaggctcagaagccaagggaggctcacaggtcccttgggctatacctgagctctcacaggctaagcagattcagtatttgactagtgctgtctgccacaggcaggaaatagacgtggtaacacagatgcagtatgtttgtgaaggtttgattagtggtgtctgctatgggcaggaactagacatgtgcttgtcatgcttagattaaaacaagtgctgatagtgtcccattgcccacaggaataatgcaggttttatttcacatgctaatggatgtactggggtgctagtccaaactgccatgtttacttgtgatcttagcacagcaaaacatggaggagaaatggcatatttactgtgtacttgccattctaaagttgaatgaaaaagcagaaggtgtctccttaacctaggccagcaattcttaaaattcaatgtgaacctgaattcccctgaatcctgtggcaaaatgtctgaggtcacctcttcagggattctgacttgataggtcaggtgctagtgccagaatttgcatttcaacaagtacccagtgtgattctgctgcagacggtctttgaacatcactggtttaagggacagggatggggctggacaccaggaccctaaatagcatcctttacggatgctaattgaacagctccttattgagaaggaaggaggggaaataccaagttagtgaccacagacttgaggctcagagagggacagtgagttctccaaggtcacacaaccaggaaatggtccttcttggttggaaacctagggctgtctggctcccaggcaaccactgcactctgcactgagagacttaattttcagaccctgcagtgaccactttccattccaacggcctcatccaatgcaaatgtcttttatcctctccaggctgctgctgcactggcctcgtccctggatccctcgccgcagatctgtcctacacagggttccagaggagtcatcctaacaccatctgaccctgtccctctcatgctcaaaacatatttgtagccttcatcaccttcatgacatggatactgctgagttctccagacacttcactccagagtgcagctattgtgagaaatgactctttgttccccaaataagcctcagaatctggatatggggcctgaatctggatatggggcctcaacacatgctccaacttggactagaatgtccttctctctggtctcagttaactctgtccctcaggtctcagtgcagaagtcacctccaccacgaagcctcctctgtctgaccctctgttttaaactttttcctactgtaaatatgtcccattttctgaaaaaaatcagcatattttaaagtattctggcacaaagctggttttcagctttcagagccatttatttatttatctatttattggagacagagtctcgctctgtcacccaggctggagtgcagtggcgcgatcacagctcactgcagcctccacctcccggtttcagtgcctcagcctctcgagtagctgggattataccacaccaccatggctggcttttgtatttttagtagagacagggtttcatcatgttgcccaggctagtcttgaattcatgacctcaggcaatctgtccacctcagcctcccaagtgctaggattacaggcgtgagccaccgcacccggcccagagccaaatatttatatgtttctgtaggtttctatacagtgggatgccttttctgtgctcctatgagaccctgtagtatggcacatattaccctgtgtggtgagtgtctgtgtcagtgcctgactctcccaccagactgggaagttcttgggaatagcaactagttctgttccatctctgggtccccagagtccagttgagggctagacacacagggaggatgagccagtaaggtgggttcctataggacagaagggagcagggactgggaccagctgggccattgagaggagcagggtgcgggaaggggccaggtggaggggctgggctgggccacaccttgtctatgtaactctggcccagccccttcacttcctgaaggtggacctgggcttgggcctggctcttcttgcctgtccgcctccgacagctcttccggtagagacagaaacagcagctgaagatgaggaggcctgagaccagcacgatggtggccagggcccaggggggcactgcagaggggtggagacaacacacattgaggcctgggcagcacgcaggctgattcagtcctgattacacgtggaagctggaatgctggcctccttttccctccagccattttcattgcatttcttcctgtgtttttcttccacctaatgtggcctatagagagattcgatgccccaacccaggctgacaccatctggatttgcttgcttgttagttctgcctttccttacccgaccccgccccccatttctgctcaactcctgatgcttttacaagaagccctgctcctcatcgggcctgtttccttatctgtaaaagaagagctaggtggaccttccaattctaagatcccattccatgcaacaccccttgatccggtttcgatttttttttttttttttttttttttttttttgcaaatctgttccttccttttaccccatttcgttcgcattccagtccaggatgacgacccgggatcccagccggattttccagcccgcctgcccgagtacacccgtccgaatcccgcccctcggaatcctggccaggctttctctctgctcggccccccacccccgggtcttgctcacctgggccgtggctgatgcgactggagtcgggaggcgtgtcgggcgatggaggccccggggttgggggctccgggaacatggtggcggggtcctggagtcttttctgcagagacactcaagcaccctagtcccccattcccaccccagacgtcctttgagccccacgcacaacaaagaactccaactcccatgaggcctttgcgcgaacagccgcgcagaaaccggacagccaccgcgagtcatgctgggagttgtagtatcagcctccccgcacttgagagggggtgtccaggacctagttccatcctaaagggataccctcttcctccacggccccacaggcatcccgctgacttctgcctcgtcctcgcccctccgcagggtctgaaccggaagcgggcgaaggcagacgtgggaaccagcagaccgcgttgcccagagcaacagccgggctcctctcaagcggggtgagagcaaagctggttgcccgggcaacgggttgttgccaggacaacgggcggggctgacgcacagacgcggagtcccggcggggcaggctcgctccggggcccaccggtgcctgggaaccccccaatagcccgactgggatcctgaggtcccgcgaggtggggagcgggcagcctgtggtccgagcgcccacagccgactgctccctccgcacctggtcctgggagctgagacgcaggttccctcttccctctccccaattttgctggagggcgggtcgggggctgcccggtgcctgtgctgagccccctcatccttcttggcctgttggtctctccacgcatccgtgctgctctcgtgaccgcctcggtctccacgctgcctcttgaccccacataggcgtcttccctgtgtctgcctccccaacccgcctgtctctcttccctatcgcctggcctctgtctccagggtctctccctctcccctccgcctgcgccccactccccgccctcggctctttgtcttctccatacctgtctcgcgtccccagatccctgtctctccgcttcaggctgctgccctccctctggttgtctccccagtgccccagcccccactcgcacacccctttcctctagggatgcggatgcggatgggctgagggcgggggtcccagcagctcctacctgctcggcggctggacgggacactcccgggagacgccgaggcgccagccccgcccggaccccaccccctgcacgtgggcggtggcgctgtcccgggtgctgatcgcggagctctccggggcgggggagccgcggagcggagcaggatcccgtgcgcgcgtgtgtgcccgtgtgcgtgtgcgcgcgtgtgtggtgtgtattgtgtgtgcccgtatttggtctcgggtaggcggaaagccctgccccgcccctcctcccgcctccacccgggaacctcgatgacgcccacagatgtttatcctggtgctttagcattttctgccttctggtccagtcgttggccgtccagaccactccactcctcccgccccaacacacacgacacacaccctgtatagcccaaagaacggcatgccaggatactcagtcctaggacctaggagaccccagacccccattggagacccagactctgcagggttcagcatcaaagtccccagctatcagcccccagacatcgccctctaagttcccctaacaccagtcccaggaggcggccagtgcggtggctcatacctgtaacctcagcactttgggaggccgaagcaggaggaatgcttgagcccaggagctggagaccagcctgggcaacatagcaaaatcccgtctctacaaaaatgagccagcgtggtggtgcgcacttgtgatggcagctactctagaggctgaggtgggaagatcacctgggcccaggaggtcaaggctgcagtgagccactgcactccagtctgggcaacagagcaagaccatgtctcaaaaacaaaaacaaaaacagaacaaaacaacaacaacaacaacagagaagagtaaaagaaaagctcagaaggcaagtccccaagcacctagctccagcgagccctgtccatactgcccagaccctggacacagacgtctggacactgccttctctgagagactcaaccacccaaacctacattttttcatgtgcaaatgtgtgggtccctctagtcccctcctggacgttcgcctcgatccctagataccaggaacccatccctactcccaatccaatattatttccagacccagaaatccatgggacaactgtctctggggagaacagtgatttaataaattatgggatagaaggaaaaatacatgtggatggtggggtgcagagagaccttgggcacagggactccctccgaccccagattatagaagactgatttggtttctgaagtaaaatcaaggcaggatccttcctgcctttggtcctcaagtagccagaactccagacccaaattccttcctgcctcagaatccaggccccagcctgtttctttctgcatcctggaaagacctagggaatccaagctatcatccctctcctccttcagggaaccaggaatccagatccccagctcccataggactcatctgaagcccaccagaccactctctcctggggaaaccagagtttgggataccagccccctcctcccacagcacccaggagtctgggagcccagccctctgctcttccaggaatctgggctcaagtgggtgtccagagcttgaggatgcctgggctgccgacccagccccctcgtcacttagacctccaacttgtgggcctggatggcggccacgttctcgtagatgaggttttcgacatcctcatacgggacttccttctcggctggggcctgggctgactgttggaggaaccgcaggatgcactgatgcaggaatacgtactgagcctgggaagcaggcacgggagtgagaggcgtccccccaggtctgagctgcgtggagccccagggtccctcgtcccactgcctcccgtcctgtgttgctgagggactgcctcacctcagtctgcaccatcaacggccgactctctctcatcttccttacaaagctgaagggcccaaggagaccctcggactgcagctgccggagcaggacgtccagggcaatgagggttcctgtgcgacccacgccagcactaggcagaacaagggaagggtcagaccaaggggcaggagtgtgagggtccggggtcatggctgattggagggatctgtgtttgaatgatgacaataactatgcctgctcacacctgtaatcccagcactttgggaggctgaggccggtggatcacccaaggtcaggagttccagaccagcctggccaacctggcaaaaccgtctcttctaaaaatgcaaaaattagccgggtatggtggcgcatgcctgtaatcccagctacttgggaggctgaggcgaagaatcgcttgaacccaggaggtggaggttgcagtgagccaagatcacaccactgcactccagcctgggcgacaagagcaaaactcccatctcaaaaacaacaacaacaacaacaacaaaactgcctggagttccttccatctgttaggctctgttctaagtgcctgatgggccttcttcactcctcccaaacctaagaagtcggatgtactagctccattgtacaaatggggaaatggaggctgagtgaggtgaagtcccattccccaggccactcagctaataagtggcagagccggggttcaaatacaggaagaggaactctccagccaatcatttagtaattcctttaaacacaaaaattagtcttttgttttgtttgagacaggatctctctctgtcacgaaggctgaagtgcagtggcatgatctcggctcactgcacccttgacctcctgggctcaagtgatcctcctgtctcagcctcctgagtagcttggatcacaggcatgcaccactgcatctgactaacttattaactttttaatagagacggggtcttgccatgttgcccaggctggtctcaaactcctggactcaagtgatcctcccacctcagccccccaaagtgctgggattacagg[136 bp omitted]tggtgaaaccccgtctctactaaagtaccaaaaaaaaaaaaaaattacccgggtgtggtggcgggcgcctgtagtcccagctactcgagaggctgaggcaagggaatcacttgaacccgggaggcggagattgcagtgagccgagatcacatcactgcactcccagcctgggcgacagagcaagattccgtcc[135 bp omitted]catgaagaaacctcatctccactaaaaataccaaaattagccaggcggggtggcaggcacctgtattcccagctactcaagaggctgaggcaggagaattgcttgaacttgggaggtggaggttgcagtgagcggagatcgcaccgttgcactccagcctgggtgacatagcgagactctgtctccacaaaaaaaaatagctatttgaacgtgagcaatttgtcacactcacaacgctgtgcagcccccacctctatctacttgcaaaacactttcatcacccctaaagcagacaccacgcccattaggccgtctctccctattgcctgtcaccctccagggcctggaagctactaatctcttcagtgtctctgttgctttggctgatctagatatgcttctggatatgcacactaatggaatgatgtga[136 bp omitted]agaaaccccgtgtctactaaaaatacaaaattagccgggcgtggtggcacatgcctgtaatcccagctactcaggaggctgaggcaggagaattgcttgaacccaggaggcagaggttgcagtgagccgagatcatgccactgcactccagcctgggcaacaagagcgaaactctgcctccaaaataaacaaacaaataaataaataaaataaaataaaataaaatggggaggacacccttttgccatgagactgtcatgaggagcagtagaactgtgtaaatgttcactgtgactgaaaccagagccccagtctcaggggctgttactcttcctcatctccctaatagttaccgttaggtgaaatctgacctacgggacttcagcataaatatcaggaaagggtcaggtgcggtggctcacgcctgtcatctcagcactttgggaggcagaggcagacggatcacgaggtcaggagttcgagaccagcctggccaacatggtgaaaccccatctctactaaaaatacaaaaattagctgggtgtggtggtgagcagctgtaatcccagctactcgggaggctgagacaggagaattgcttgaactcgggaggcagaggttgcagtgagctgagattgcgccattgcactccaccctgggcgacagggagagactccatctcaaataaaataaaataaaataataaaataaaataaaataaataaaataaaataaatatcagggaagcagttgatgggggaggccctgcactccagcacagggaagtgtctccagtgtttctcagaatctgtggccacatccccatcctgtggcttcatcctttctcccttctcttctgcattcaaccttctctgcctttaccttttcatctttctttttttccttttttttttaatcgagacagagtcacccaggctggagtgcagtggtgcgacctcagctcactgcaacctctgcctcccgggttcaagtgattctcctgcctcagcctcctgagtagctgggattacaggtgcccgccacgacacccggctaatttttgtatgtttagtagagacaaggtttgtatgttggccaagctgttctcagactcctgaactcaagtgatccacccgccttggcctcccaaagtgctaggatttacaggcatgagccaccgctcctggcctgccttttcatctttcgttcccatcttttcatccttatcccctttcttttcttaatctgcttcacgcccccctttatcttccacatccacctcctccttctctccctcttcacctcccctgtacgttcccagggtcccgtctaacacaactgtctgagccccaagggagcggttctctcaagggagagggtcctgggctggtccccacctgcagtgcacaatgggtgggcctccctccatggtctgatccagccactgccgaagcatcctccagaaagccagcaaggtgtctggggaggagggaacgccgtgatccggccaggcctggtagtggaattggcgcacagacagtgtcttctgctcctccacctggaaggagggagcactcacaggctctggagatgaatgtagggaggacctggcttctagcaccaggagcgggttccctggggcacactgcagctcctcagaggagtgggtggaaggttggagttggtggagggtcctggatgcatggcatatgtcacaggggaaggctgagggccaggacggggctggacacacgcacctggaggagcagcagttcccgcaccgtccagttctccatcacttcctcacctaccagggttacccgcaggtgcccatgggtgcagggctgcgagtccagaggccagtaatgctcacacttcacctgggggaggaggaggggtcagagaacacaactcctcttacccaggtctgtggggtctgctttaggccccaaatgtgaaccagcagatgggctggggggagagtggggaacaggtctacactgaagacgcctggggttaccctggaggaatccgtaaggtctgggtgtggggtctacattggatgagtgttcggggcggggtcctgcacccagtcagcacccaggactcagatctctcacccggccggcctccatgcagttggtcagcatgaccagggtgtggctctgctgttcccacaccaggcgccagaagtcacccactgtctgtggcaggggaccctgggttgcaatgaactcctgggggctccagagaccctggttgaggaaggcaggcgggtcaggggggcctttagttgatccccgagctcttatctctccaggcgtgctgggcaccctttcaatcccaaccacgaccttacgggcatgaagctggcattgatgtagtcagagcctggctcctcatggatgggcttcaggggcacccgggaccagtcatctaggagaagaggccagcattagccaggcagagagacccagagaggcacagagacaagaccacaggcagagagacccagagaggcacagagacaagaccaagacccatggacaaaagtcatgccgagacgcaggcagaccttgggagctacacagggactgagaggggcggagggacctcagctgcagggagcaggccaggaggactctcaaagggacccacagccgggtgcagtgactcacacctgtaatcccagaactttgggaggctgaggtgggtggatcacctgaggtcaggaatttaagaccagcctggccaacatggtgaaacccggtcgccattaaaaatacaaaaattagccaggcatggtggcgggcgcctgtagtcccagctactagggaggctgaggcgggaggattgcttgaacccgagaggtggaggttgcagtgagcggaggtggtgccacttcactccagcctgggtgacagcaagactct[132 bp omitted]cctgtctctaccaaaaatacaaaaaattagccgggcgaggtggcgggcacctgtagtcccagctactcgggaggctgaggcaggagaatggcgtgaacccgggaggcggagcttgcagtgagccgagatcgcgccactgcactccagcctgggtgacagagcgagactccgtctcaaaaaaaaaaaaaaaagaaaaaaagaaaaaaaaaaaaggaagaaaaaaaaaaggagacccacggtagggggcaggacttgtttctcaaagcgggtaggagaaggggactggggtggggtgccgactagatcagggctgggacaaaagcagcaggaacccgagactcacagggcagcacatttctgtagcggttcttggcgttgttctctgaagccgaagccaccatctgagactggctgtggcccaccagggagagttgctggggatgcagggagagggggtacctggtgttggattttctctactttccctcgggggtacccccgagctccccttgccttcttcggcatcaccccttgtttattcgttgcaccctgagattatatggcacccacaaaaacagaatagatgtgtgtgccacctgccctgtggggcactggggaggatttagggaaccatgggacttcttcaggcaggcaagaaagcaggtgtcaggggagaaaggactcactgggtgggggcagagagagttactttaggactgacccaccattattttaagatttcagtgagtggaaagataacatggctgggaatctctgcacaatccaatgacatatgtgatgctacttttgcttaatcccgaaagccgtgaggtctggccagggggtggggggtgggggtctgggccaccggagggagactgagctcagcccctctgtcctctccccacctggtactcgtctgcaaaaccacagttgctgtccctctcattcttcctgacgtggtcagcgaagtcttcagctgggatgtcccctggggagctacgggttttgggggagcagg[154 bp omitted]tctactagaactacaaaaattagccgggcgtggtgttgcacgcctgtagtcccaactactcgggaggctgaggcagaagaatctcttgaacccgtgaggcagaggttgtggtgaaccgagatcgcaccactgcactccagcctgggtgaaagggcgagactccgtctcaaaaaataagaaataaaataaaataaaataaaaaataataaacatactcagacagccctacacttacacttctcatgcagaccagtttttttctccttcctgtcatcctatcaccatggcttggagtctatatccactactccagggaacacctttctccaaaatcgtcgtggcctccctgtctgtaattgcaaaggccacgtttcagcccccaccggcctgactgctcagcagcatttagcaccactgcctgtgcctgccttttctcctggatctgcactgttccggaacacccagccctggcttggcccccacctacccagctgctgcttgttcatttcctgggcaggcccctcctcctctgtccgtcttaaaaggtaactgttccccagtgtccaaccccaagccacttttcttgctggacgcacacttcttacagggtttggcccattcctgtagtttcactttctttctttttcttttccttttccgagaaagagtctcatcctgtcgcccaggttggagtgcagtggtgtgatctcagctcactgcaacctcagcctctggagctcaagtgattctcctgcctctgcctcctgcgtagctgggattacaggtgccagccaccatgcccggctaatttttgtatttttagtagaaacggggt[146 bp omitted]ttcttcctaaacatgttagactgtgtcactagcctattcaaaatctcccaagaactctcagctcacaataaatccaaagtcctaactttcaactacaggcctgtgcctgctgtggccccactgacgtctctctgacctcacttcccactgccctccccttcctcactctgctcagtcggagacgcacgatgttctctgaacctcacgtgtgctgttgcctcaggccctccacgcgcccatccctgtcctgggagcgcctttcccagatgcatgctcggctcctctcccacttgcgtaggcctgtactcagatgacttcctcttagtcatcttgttagcaaagctttccttgaatatcctgccgaaaatattcctgctgggtgcagcggctcacgcctgtgatgcaaacactttgggaggccgaggtggaagggctgcttggggccagaagttcaagaccagcctgggcaacctggtaagaccacccccccgacctccatctctacaaaaaattaaaaaattagccaggcattgtggtgcgtgcctgtggtcccagctactggggaggctgagatgggagggtcacttgagcccaggaggtcgaggctgcagtgagctatgattgcgccactgcactccagcctgggccacagagtgagaccctgtcttgacaaattaataaataaaataaaataaaataaaataattcatctgattttctctctaatttattctaattttcacattagaagaatatcaaaataggccaggggctgtggctcacgccggtaatcccagcactctgggaggccgaggcaggtggatcacaaggtcaggagttcaagaccagcctggccaacatagtgaaacactgtctctactaaaaaatacaaaaattagctgggcgtggtggtgcatgcctgtattcccagctactcgggaggctgaggcagtagaattgcttgaacccgggaggcggaggttgcggtgagccgagatcatgccactgcacttcagcctgggtgacagagcaagactccacctcaaaaaaaaaaaaaaagaatatcacaatattcctctacccttcctatcccctccttttgccttgtctccaagtttatttatatattttatatattataaatttatatattatatattatataatttatatattatattatatataatgtatattttatattgtataatatatataatatataatatattatatatataacatataatatattatatattataaatttatatattatatattatatatattataaattatatatatatataatttttttttgagacagagtctcactctgttgcccaggctggagtgcaatggtgcaatctcagctcactgcaacctctgctcccgggttcaagtgattctcctgccccagccacctgcgtagctgggattacaggcgtgagccaccatgcctggccctgtctgaaagtttatatcatattttttatgatcttttttaattttttattactattatttttttgagacggagtctcgatctgtcacccaggctgcagtgcagtggcgtgatctcaactcactgcaagctctacctcccaggttcacgccattctcctgcctcagcctcccaagtagctgggactataggtgcccgccaccaagcctggctaattttttgtattttttagtggagacagggtttcaccacgttagccaggatggtcttgatctcctgaccttgtggtctgcctgcctcagcttcccaaagtgctgggattacaggcatgagccaccgcacccagcaatcttgtttattgatatctcctgtactagaatataagcccctggcgggcaagaatcttggtttcatttgctgtttgtttggcacctggaacagtgcctgatacatgctggtgctcagctgatatctgctgaatgaatgaatgtccgggagttgagaccagaactgaattcgctggcccaggctgcttggggagtgagtcacgatggaagggccgtggtccctgtcgcagaggcatgggccccttctgagacctttgtgggtaaatgcattgatccaccctctgacctagctggcagccagcaaacaccccttgatttgaccagattctttccaatgcaccccccagaccttctgctcacctaaagaccagatccctgagttctggtttctgctgcttcttcttattcctgggaaaaggacgttaggatgagaggctcagggggtgaggctgcaaccagcggtcctcctccttcttctccagcccccaccctccaggcggtcagccctgtgctgagtctcacctcctcttcaggaagaaaatcagcaggcccacgaggatgagaaacaggaggatgcccacaaaggctccggcaatgacccctgtggggaggaggcatcgggaaccctcagagcgcaggtctgagctgctcatctgtctccaaccctgcccagcctttcctcttccccaggagcctggtccaaagacagctgacccccgaacatcacacggtgtgaattgcgtcggtccagttatacttacgcgcttacccatggattttcctccacccctgagacagcaagaccagcccctctcctacctcctcctcctcctccgcctactcaacgcgaagactacaaggaggaagacctttatgatgatctacttaataaatagcgagtacattttctcttccttaggatattcttagtaacatttttttctttagctacttgattataagaatacagcatatagtacggccgggcg[132 bp omitted]cgtggtggtgggcgcctgtagtcccagctactcgggaggctgaggcaggagaatggcgtgaacccgggaggtggagcttgcagtgagcccagatcacactactgcactccagcctgggtaacagagcaagactctgtctcaaaaacaaacaaacaaacaaaaagaatacagtatgtagtacatattacagatgaaatgtatgttgtttatgttattggtaaggcttccaatcaagagtaggctattagtagttaagttttgggggagtcaaaagttatgtgcagatttttttttctttttctttttctgagacagagtcttgctctgtcacccaggctgcagtgcagtggtgcgacctcggctcactgcaacctctgcctcccgggttcacgccattctcctgcctcagcctcctgagtagctgggactaccggtgcccgccaccactcctggctaattttttgtatttttagtagagttggggtttcaccgtgttagccagggtggtcctgatctcctgacctcgtgatccacctgcctcagcctcccaaagtgctgggattataggcatgagccaccatgcccggctgttatatgcagattttctactgtgtaggggacaattgttcaagggtcaactatccatcattttcacaggtgacctggttgctgaagagtgactcctggccaggcatggtggctcacccctgtaatcccaacactttgggaggctgaggtgggtggatcacttgagcccaggagtttgagaccagcctgggcaacataacaaaacccagtctctactaaaaaaacaaaagttagctgggtatggtggtgcacacctgtcatcccaactactcaggaggctgagcataagagtcacttgaacccgggaggtggaggctgcagtgagctgagattgcacgactgcactccagactgggtgatagagtgagactctgtctcaaaaaaaaaaaaaagaaaaagaaagcaaaacaaaacaaaaagaaccccaacaaaatagctgggcatggtagtacatgcctgtagtcccagctactcaggggactgaggcaggaggatcacttgagcctgggaggtggaggctgtggtgggcatgatcgtatcactgcactccagcctgggcaacagagtgagaccctgtctcaaaaaagaacaaaacgaaacaaaacaaaaaagtgattcttgccttccttagcttagactagtggttctcaacaagggtgattttgctcccaaagagacaccgggcaatgtctggagacgcttttggttgtcacagcttggaagtgggagtgctgctggcacatagtgggtgggaagcagaggtgcagctcaatatcctacaatgcgcaggacggcccccccacaacaaagaaggatctagccggaaacgtctgtagtgccgaggcgggggaaacactttgctggttgtgaaatcatccctggcatggacggcttctgttctccccagattgaggcttcatcttctcagaggtcctgctggctggggaaggactccccggcagcggagcctacccagatctggtggtgtcttttttttttttcttggtttgttttttgagacggagttttgctcttcttgcccaggccggagtgcaatggtgcaatcccggctcaccgcaacctccgcctcctgggttctagtgattctcttgcctcagcctcctgagtagttgggatgacagacacgcgccaccacgcccagctaattttttgtatttttagtagagacagggt[148 bp omitted]agttctcccaagatctgtcattagatgtctcgtcttagggtaggctcaagcctatggcccatcttcatcagccttgaaggcccccaagctgcagcttctcagcaatcctgggaagagtgtgtttgttgacagggaactgaagggtcttacaacctgtacgggagacttggcctcacagaatggacttggcctcacagaattggactagaggacctgttctctcagggatccttgttactaagggagagaactttctaagcaatggggtctggcaaagcccagttcaaacagcatccactggtcaccacatcaaccctcagtctctctccagattggagacccaatctcataagaaaccctattcctaggaagtgattgatggggcaaagtgaagcttatggccatggtcttggtacatggccaggtctttccaaagcttaagctccaaagtttttcaggtaccccattgattactgcaagatgatacaaccacattaggaaaaataaaacccggggtggggggtagttaaatgtatagttcccatgtgatccctcagttccactactgggtatagacccaagagaaataaaaacatacgtccacacaaaacctatccacaaacgttcctagcggcattacccataatggtcaaaagtggaactactcaactgacccatcaactggatcaatgaatggataaaaatgaatgggtaggccaggtgcggtggctcacacctgtaatcccaacactttgggaggaggagccaggaggattacttcaggtcaggagttcgagaccagtctgtccaacatggcaaaaccccatctctactaaaaaaatttaaaaattagctgggcatggtggctcatgcctgtaatccctgcacttcaggaggccgaggcgggtggatcaccggaggtcaggagtttgagaccagcctggccaacatagcaaaaccccatctctattaaaagtataaaagttagctgggcgtggtaggaggcgcctataatcccagctactcaggaggctgaggcaggagaatcgcttgaacccgggaggtggaggttgcagtgagccgagattgcaccactgcactccagcctgggcgacaagagtgaaactccgcctcaaaaaataaaaaataaaaaataaaaagttagccaagcatggtggcacatgcctgtgatcccagatacttgggtggctgaggcacaagaattgcttgaaccctggtagcagaggttgcagtgagcagagatcatgccactgcactccagcctgggtgacagagtgagtctcaaaacaaaaacaaaaacaaaaaaacaaattatgctcagtgaaagtggccagtcacaaagaaacacataatgtatgattgcattttttttgtttttgaaacagggtctcgttccttcacccaggctggagtgcagtggccccgatcatagttcactgcagtctcaacctcctgggctcaagtgatccttctgactcagcctcctgagtagctaggactacagacacacaccaccacagctggctaattttttaaaatgtagagatggggtctcactctgttgcccagactggtctcgaactcctgagctcaagtgatccttccacctcagcctcccaaagtgctgggattccaggcatgagccactgtgcccactctatgattgcattttaatgaaacgtcccagagaggcaaatctatagagattgaaagtggatgagagatttccgagggctgggggctggggaatgggagaactagggggtggtggctcagcggggtgagctttctgttgggggtaatgaaaatgttctaaaattgatagtgatgatggttgcacaatgttgtgaatataagaagagtcactgaattgtaactttaagtggtgagttgtggatggcgcggtggcccacacctgtaatcccagcactttgggagcctgaggcaggcagatcacctgaggtcaggagttcgagaccagcctggccgacatggtgaaactccatctctactaaaaatccaaaaattagccgggcgtggtggcacgtgcctgtagtcccagctactcaggaggctgaggcaggagaatcacttgaacccgggaggcagaggttgcaatgagccaagatcgtgccactgcactccagcctggacaagaagagcaaaactccatctcaaaatacaaaataaaaaagatgtttcaaaggaaatgagaaacaaaagagtcccactgatttcctcacaatggggcctgatggggtctaccgagaatttcatcatagctggctggcccgcgcggctccgctcacctgcactctcggtgtggcagaccacagagtgagacacgaccttcattccgtcccagatggtcgtgatggtggctgggtaggaccgagccggcccgagacccaacacagacacagcctccccacatgaagatctgtcctgggagccccgctgtcctcccacctccaactcaaaggcctcgtagcctccctgggggcaggaccagatcaagttgactccatagcccgctgaggtgctgacacaggaagtgatggtgactgtgtctgggtctgggtgaaggaagcaagaggtcagcagtgccatccaaggtggctttccaccccctccacccctacccccagttttctgagacgagcccatcccttcctcgccaaatccaaactacctcatcttccctccttttctgtcctccccgaatggacacaaataagtccttttaaactacaactcccatgaggccttgggctcctccatcactgcagctcatgaagtcatggcctgtggcctgatggaatttgtattccattcatctctcagctcgcaaggactgtgagctaagcccagttcaccacttgaaggcaggaaggggattctcacatgtggacgcacagaggctctgcgtggaactggctacgtcattcctctctgcccacacggtgaaattgtacaacgtcccgggttccagggcctccactttgtaccacgtctcattggtcctgctggtctggttgacccaattcgcttggggatcttgccccctccggggatgtcccttgctggcccactggacccagtatacgtacaactgagagtgggggtctccaggggccttccaccacagcatgactgagttcttagtctgagtttcattctggagatctgtgacctcattgggagctgagaagtgagaacagaggcctaagggggtatcctcgaagaccctcctaccccagcctgtctgcctctcccccacagcaaagctgagatatccattattgatggctccagtggctaaggaggctgaaccacaggaaagagtctagatacccaaagaccatggggaccagaatctcctagccctctccgtcccctggctacagccctgggtcccaccctgtcatctttctgttcttcccaaatgcacaccaattccacctactgaaactacagttcccatgaggctatggattctctgtatcgcttcagcttatgaagtcatggccccatggtgtgatgggatttgtagtcctccacctctcatggccctcgagatctgatctctgtattttctttcccacaggaaccccaggtagggtgtcttctcactctagacacaccacgtttgtagagggagctgataaatttcatctttttagcccaaatgaccaaggattaaagagttccaggttcaggccaggcatagtggctcactcctgtaatctcagtgctttgggaggccgaggcgggaggatcacttgagcccaagaattcgacaccagcttgggcaacataaggagaccctctctctacaaaaaatatttttttaaatgagctgggcatggtggcgcatgtttgtggtcccagctactcaggaggctgaggtgggagaatcagttgagcccaggaggtcgaggctgcagtaaccatgatcacactactgcactccagcctgggcaacagagcaagaccctgtcacacacacaaaaaagaatgaacctagtctccagagtgattttgatttttctcatgagtgggacccaccgtgcctaggctgagaggtggggccctctcgcttcatctaattccctgggaccagctgttggctattgtccagctggtgactttgtcagctcctgagaggtggtgctggacaattgagggctccccctgaccccaaagagtccatttcccaaagggagaaaaaacaggtcccacagcttggaaagccctgtctgctaagaaacgacacccactaggaacgggacctacaggtttaagctccggccggtgaggctggagaggcccatgggtactcttcatctcccaaggagctcccaaagtcctttcatctttttccttcccccatcctaatagggctgggttcagaaccgactgtgtctcaccagtggctgcagtgagggtgctgttatagcctctgacctcattcctctcggcccagacggtgaggtggtacaggctgccagcttccagttcctttagggtgatgtcagtacctgaggtgctttgggtcctggggtcagtcatgccttccctgacccatgagacccagtagctgtaggaagactggcctgggccctggggagctgtccagcgcaaagcaatggtgctgttggtccagtcctgcttgctgaggcttgtcactgcgttggggactgggagagggagcagagtcaggatttccacatcccctagtcctcaagagtccagaacacagtgatacgccctgtccttgtgcagcccagctcatccagaaacacttcctggcagggcacagtggctcaggcctgtaatcccagcattttgggaagctaaaccgggagggttgcctgagcctgggaatttgataccagcctgagcaaaatagtgagaccctatcgctactaaaaattaaaacaaattagctgggcatagtagcacatgcctgtagtcccagctactagggaggctgaggtgggaggatcgcttgagcttgggaggttcagtctgcagtgagctatgattgtgcctctgcactccagcctgggagacagagcaggaccgtctcaaaagaaagaaagagagagagaggccgggcgcagtggctcacgcctgtaatcccaacacttcgggaggccaaggtgggtgacttgaggccaggagttcaaggcaagcttgggcaacatggcaaaaccctgtctctactaaaaatacacagattagctgggtgtggtggtgcgtgcctgttgtcacagctacttggaaggcagaggcaggagaattgcttgagcccaggaggcagaggctgcagtgagctgagattgtgctattgcactccagcctgagtgacaaaggaaaactctgtctcaagaaagaagaaagaaaagaaggaaagaaagaaaagaaagaaggaaggaaggaaaagaaagaaagagaaaagagaaagaaagagagaaaggaagggagggaggaggggagggagaaaggaaggaaggagggaaggaaagagaaggaaagaaagagaaagagaaagaaagaaagagagagagacagaaaaaaagaaagaaagaaggaaagaaagagaaagagagaaaggaaggaacaaggagggaagggaggaaggaaggctttaaaggaaggaaagagaaggaaagaaagagagaaaggaaggaaagaaagaaaggaaagagagaaagcgagaaaggaaggaagaaaggaaggaaagggaaggaaggaaggggaagggaaggagaaagaaagaaagaaaaggcctgtgtccccacagccccacactcagcgggagaagtctggatgggctctcttcttcctcagggcagagccagcccccagctgtgattacatctgtcctgtggacttggagaggcagatgtctgcagagcctacggactacagagccagagcccagaagaggtgccacgccgctcctgctggttcttaacctctcaccaaaacagggagtggccgttgagggttcctacctgtggagatgctgacattctgcctggagccacgtgctccatttttttctgcccatacagagaatgtgtacaaggttccgggctcaagtctctcagctgtcacactggtatttgttgtgtttcgggtctctgtgccaccaccgtctccagtgtactctacccagtaggtgtagtcctgagggtatgggccatcggggacttcccagcatagggcgatggagctgttggtctgagtctccatatggaggtttctcactgggttgggggctgagaaagtaggaagaagatcctatgttgtcggagatacagaacagaacggggcaggagtgggcccctcactgccctcaaccatcttagctcttgttcaactgctggtgccagcagatgcagggtgtatgttctagaccgtgtttctcagactaatgtgccgggcgtggtggctcacgcctgtaatcccagcacttcgggaggctgaggcaaggggatcacctgaggtcaggagattgagaccatcctggctaacacggtgaaacctgtctctactaaaaatacaaaaaattagccgggcgtggtggctggtgcctgtagtcccagctactcgggaggc[133 bp omitted]aataaaaatctccaatggaatagcattaagaggtagggcccttgcaagattaggtcataaaggtgaagcctttatgcctggggttactgcctaagagaggcccaatggcccagcacagtttcacatttcatgtgagattacatgcctgtaatctcagcaatttgtggggctgaggtagggagattgcttgaggccaggagttagagaccagcctggaccacacagcaagacctcatctctaaaaaaaataaattagtcaggcatggtggcccacgcctgtagtccctgctacttgggaggctgaggtcggcggattgcttcagcccaggaatttgaggctgcagcgagctacgatcctgccactgcactccagcctggatgacaaagcgagactccagctctaaaaaaaagaaaaaaataagagagactcaagggagctttgtgtggtgatgaagacagtctctcactttccaatatggtaggcattagcaccgtggaggatgaaggggggactgggagcccctcaacaggccttttgagcacatgaaatgtgaaactgaatttgcagtttcatgcaactttaatgagtttaaatttaatagccacgtgtggctagtggctaccatattggacaatggaggtgtagacacagggagctgtccacatcagggtcatggagctgatgatctgagtttccatcctcaatatgtgacacagttgggaactagaagaagagtcagagggtcagagtgtccccactcacagtatctaattccttgaaagctcaggtaacatgccttggcccctacacattcctcttggtgcaggaaggtgccccttggcattatggtccacattctagagagtcctagacacagactggccccaacttagcagctggaggtaccatggacattcattccttcttcatctcctgagctgagactgccccaggatgtggacatgagtacctggctcaatatggcccagagggactatggaatagacaatcgtctacattctactgcttactgtcccttaaacaaataagagatcaaacaaatggcgactgcctctcacctgtggtggcatttcgagtctcccgggagctgttgattccattcttccccacccacacggaaaacacatacaaacacccgggttcaagtctatccacggtgatgttggtgtgtgctgtgcttcgagtccctgctctgccaccatctccagtgtactcaaccccgtaggtggagttctgtgggtctgggccatcggggacctcccaggtcagggcgatggagctgttggtctgagcctccactgtcaggtttctcactgggttgggagctgaaaaccagcacaggagggaaaatcagttgtagtttctggccctcaaactttccagcccttccttaaccattgcatccagcaggtggaggcagggaggcccagttctgcactgtccagtgtggcagccacgagttccacgtgagtgttgagcaccgtgaggtggcttttgtgaaatgagatgagccgttagtgtaagatccacaccggctttcgaagagttcgtatgaaattaagaattaagaatgtcaactatctgattgatcctatacacacacacacacacacatatatatacacatacacatatatatacacacacatatatatacatacacatatatatatatattttgtgggtatatactcagtgtgtatatttaatgatcctttccttatattgattacatgtcaaaatgataatattttgtatctgccaggcgcagtggctcacacctgtaatcccagcactttgggaggctgaggtaggcggatcacctgaggtcaggagctcaagaccagcctggccaacatggcgaaaccccgtctctactaaaaatacaaaagttagccaggtatggtggcatatgcctgtagtcccagctactcaggaggctgaggcaggagaatacttgaacccaggaggtggaggttgcagtgagtcaagatcatgccactacatt[139 bp omitted]ggtgaaacccgtctctactaaaaatacaaaaaattagccaggtgtggcgg[201 bp omitted]tttccttccttccttccttccttccttctttcttttttgagacagggtttctctctgttgcccaggctggagtgcagcagtccaatcagagctcactgcaacctctgcctcccgggctcaagcgatcctctcacctcagcctcccgagtaggtgggaccacgggaacacgccaccacagctacttttttattttttttgtagagacaggctgaccagtttctttgtacttatttttatgtggctgatagaaaattgaaattctcacctgtggcttccactgtgtttctattggactaaagaacctgtcacattttgtcagctcccaaccaccccctaccactgtccttataaaagaaataaaaataaaacagcggctgcctcttacctgtggcactagtgacaatctccacagagctatttactccgtctttctccacccacacagaacacgtatacaatgacccgggtccaaggccatccacggtgactctggtgtctgttgtgtttcgagtctctgttctgccaccatctccagtgcactgaacgcagtaggtcgagttctgtgggtctgtgccatcggggacctcccagctcagggagatggagctggtggtctgagcctccactctcaggttcctcactgggttgtgagctgagaaattaggaagaaagatctaatatgagcaggactacagaacataacgggggcagccagtgagctttttgtttgtttgttttttcgagacagagtctctgtctgtcatccaggctggagtgcagtggcacgatctcggctcaccacagcctccgccgtccgggttcaagcgattctcctgcctcagcctcccgagtaggtgggactacaggtctgcaccaccacacccggcttatttttatattttttcaccatgctggccaggctggtctcgaactcctgacctcaggtgatcctcccacctcggcctcccaaagtgctgggactacaggcgtgaggcaacatgcctggccaagtgggcatttttgatcatcagagttcctagttgtccctcaacagctggtgccagtagatgcagagtttatggtctagaccagggcttctcattctttgctgtgtgcacatctcacaggggaccttgtgaaatgcaggttctcactcagcagggctaggatggagctgagagactgcactcccccccaccctttttctcccccaccagtgtcacttgccaatgtatttccatcagctctcagagacccggatgctgcccacacatggaccacactttgagtaacaaagacctgagccagcgctttccaactgagcttctgcaacgatggaaatgctctcccaccttccagtatggtaggagaacagagaaggaaatggaagcccttcaacagggctttcaaacatatgaaatgtgaaactgaatttgcagtttcatgcaactttaacgagcttaaatttaatagccatgtgtggctggtggctaccatatcggacaatggagatctagccagagggagctctccacatcaggatcatggagctgatgatctgagtttccatcctcaatatgtgacgcagctggggactagaagaagagtcagagggtcagagtgtccccactcacagtatctaattccttgaaagctcaggtaacatgccttggcccctacacattcctcttggtgcaggaaggtacattctagagagtcctagacacagaccggccccagcttagcagctggaggtaccatggacattcattccttcttcatctcctgagctgagactgccccaggatgtggacatgagtacctggctcaatgtggcccagagggactatggaatagaaatccgctacgttctcctgcctactgccccttaaacaagtaagagcaaaacaaatggcgactgcctctcacctgtggtggcatttcgagtctcccgggagctgttgattccattctttcccacccacatggaaaacgcatacaaacacccgggttcaagtccatccacggtgatgttagtgtgtgctgtgcttcgagtccctgctctgccaccatctccagtgtactcaaccccgtaggtggagttctgtgggtctgggccgtcggggacctcccaggtcagggcgatggagctgttggtctgagcctccactctcaggttcctcactgggttgggagctgaaaaccagcacaggagggaaaatcagttgtagtttctggccctcaaactttccagcccttccttaaccgttgcatccagcaggtagaggcagggaggcccagctctgcactgtccagtgtggcagccacgagttccacgtgagtgttgagcaccgtgaggtggcttttgtgaaatgagatgagccgttagtggaagatccacaccggctttcgaagagttcgtatgaaattaagaatgtcaactgtctcattgatcctttatatatatttgtgtgtgtgtgagtatatacttggtgtatatattgaatgatcgtttttatattgattacaagtcaaaatgaaaataccttgtatctgccaggtgcagtggctcacacctgtaatccccgcactttgggaggccgaggcaggcggatcacctgaggtcaggagttcgagaccagcctggccaacatggcgaaacccagtctctactaaaaatacaaaagttagttgggcatggtggcacatgcctgtagtctctgctactcgggaggctgaggcaggagaatcacttgaacccaggaggcaaaggttgcagtgaaccaagatcatgccactgcactccaacctgggcgacagagcaagactctgcctcaaaaaaaaaaaaaattgtatctgatggactacataaaatctctcatagtaatttagtttgtttttcttttcttttgttttcttttgttttcttttctttttttttttttgagacagggtttctctctgttgcccaggctggagtgcagcggtccaatcagagctcactgcaacctctgcctcccgggctcaagcgatcctctcacctcagcctcccgagtagatgggaccacgggaacacgccaccacagctactttttaatttttttgtagagacaggctgaccagtttctttttacttatttttatgtggctgatagaaaattgaaattctcacgtgtggcttccactgtgtttctatccaactaaagaacctgtcgcattttgtcagctctcaaccaccccctaccactgtccttataaaagaaataaaaataaagcagtggctgcctcttacctgtggcagtagtgacagtccccacagagctatttactccgtctttctccacccacacagaacacgtatacaatgacccgggtccaaggccatccacggtgacgttggtggctgttgtgtttcgagtctctgttgtgccgccgtctccagtacactgaacccagtagttggagttctgtgagtctaggccatcggggacctcccagctcagggagatggagctggtggtctgagtctccactgtcaggttcctccctgggttgggggctgagaattgggaaggaaggtctgacaaaaagggaaccaggtcagtacaatccctcccaacccctgagctcacgccccaagtccagaaacaacggcgctcataaacccctaccatggaccactggaccccacggggaccccccagaggctcacggcagttgcggtcccacctcttcgagtgggcagtgagttcaggcaggggtcactcaccaggcgccctggcccctgtccagctgcacaggccctggagggaacccagagaaaacggagtcagcctctcaaccactcctccgcccagtgaggccgaggggctgggaggagcggctggtccccgccccatgagtcacccttgcatgggaaggaggggccggtgttaggctgggctgtcacgacctcgaccgtctttcctgggtcgaggagagaagggggagcatggcaggagcagagcttagggagctggggttggctccacccgataaggctgagagataaaattaatgatttcatttcctgaaatatatgtccttggaaaaccgagggcagagagcaatgaacagactgggaagggagaaaaaaaccaaggttggggatcaggaaccttggcctgagggtggagggcctgggggcctgggggcctgggtctgagggaggaggggctgggggtctcgacctctggtttgagggaggagaggttgggggcctggactcctgagtctgagggaggaggggctggggtctggactcctgggtctgagggaggaggggctgggggtctcgacctctggtttgagggaggagaggttgggggcctggactcctgagtctgagggaggaggggctgggggtctggattcctgggtctgagggaggaggggctgggggtctcgacctctggtttgagggaggagaggttgggggcctggactcctgagtctgagggaggaggggctggggtctggactcctgggtctgagggagtaggggctgggggtctggattcctgggtctgagggaggaggggctgggggtctggactcctgggtctgagggaggaggggctgggggtctcgacctctggtttgagggaggagaggttgggggcctggactcctgagtctgagggaggaggggctggggtctggactcctgggtctgagggaggagggcctgggggcctgggggcctgggtctgagggaggaggggctgggggtctcgacctctggtttgagggaggagaggttgggggcctggactcctgagtctgagggaggaggggctggggtctggactcctgggtctgagggaggaggggctgggggtctggattcctgggtctgagggaggaggggctgggggtctggactcctgggtctgagggaggaggggctgggggtctcgacctctggtttgagggaggagaggttgggggcctggactcctgagtctgagggaggaggggctggggtctggactcctgggtctgagggaggaggggctgggggtctggactcctgggcctgaaggaggagggactgggggtctggacccctgagtctgagggaagaggggctgggggtctggactcctgagtctgagggaggaggggttgggggcctggactcttggtttgagggaggaagggctgggggcctggactcccgggtctgagggaggaggggctggggtctggactcctgggtctgagggaggaggggctgggggcctggactcctgagtctgagggaggaggggctggggtctggactcctgggtctgagggaggaggggctgggggtctggactcctgggcctgaaggaggagggactgggggtctggacccctgagtctgagggaagaggggctgggggtctggactcctgagtctgagggaggaggggttgggggcctggactcttggtttgagggaggaagggctgggggcctggactcccgggtctgagggaggaggggctggggtctggactcctgggtctgagggaggaggggctgggggcctggactcctgggtctgagggaggaggggctggggtctggactcttggtttgagggaggaggggctgcttcctgtccgtgagcacagctgtgtgttgcctgaagccagtgtcccccgcagcagacacgacagtgtctaagggcccgggtgaagctggtgtcccccacaacagacacgacaatgtctaagggcccgggtgaagctggtgtcccccgcagcagacacgacagtatctaagagcccaggtgtaagactctcctacagtctctgccaagcctgaagccctcttccttctccaggggatcttcagcacctacttcctcaagatcgaggtgcaggcacccagctccttctccctcagacctgggagtccctgccttgggagcccgctctgggcggggagcacttaccagcagcaccaggttcccccagaccccgaggcccccgccagccccagccatgcctccagacactgccggggacccaggagtcccaggcctagtccttccacctgctggactttacactcaagaatttcccctttaccagatcattggtgaagccagaggccagggcgggaaggggaggaggaggaagtggaacccagctcccaaccctgccccgctggccctcaccttcctccctcaccgctgcctctagctctgacactggagatgcctcccatcctttctccagcccccagcccactccactttgtcccccgaaatctccctctgcaccccaggtaccgggtgccgcgccccactgctgcacggatgcgggacgtggggcagaggatgagagcagggggtgctgagagaaaggccagctgactccctcgcctccctggtgggtgatcacacatcaagagcagcctggggcttagacctcatgcccctcgtccctggagcacgctcttccattcagcctctgacgcctttcccctctccgtctcccacaagcccctgcagctctcacaaaatgagcccagcgggctcctgcctcttggcctttgcctagactgtctcccccaccagatgcacctgcctactttccccctaacagtctcctacccactgctccattaggattcagcttggaaatgacccatgccgggcctggggcctttctagcctggtcaggaccctgtgcactgtcttccacaccccagactctctaatttgcatatccatctgtgaccctgagcaaatgacttaaatccacagtgactcagattcctcatctctaaagaatgggcacccttgtaaatatgctaagagaaatagatgagttactacgtggaaagtcttggaacaatgcctggcccattttaaacagttgataaatattagtcatgtttatttttagttcatccctaggccacctgtgctcagaaggggcctgacacccagggcttttcaaggtgtttttgttgacttactatgtgcacacgtggactgccttcatctcacatatagtgcggaaatgaagaatagaaaccccagccgggcatattggtgtgtgcccagctactcaggaggctgaagtgggaggatcacttgagcccaggagtttgagaccagcccgggcaatatacaaaaccccatctttacaaagaaaaacaaaaagagagaaaaaattacccaggcatggtagtgcacgcctgtagtcccagctaccgggaggctgaggtgggaggatcacctgagactgggaagtcaaggctgcagtaagctgcgattgtgccactgcactccagcctgggtgacagagtgagcccctgtctcagaaagcaaaacaatggccaggcgcggtggctcacacctgtaatcccagcaatttgggaggccgaggtgggcagatcacctgagatcaggagttcgagaccagcctggctaagatggtgaaaccccatctctactaaaatgcaaaaattagctggctgtggtggcaggcacctgtactcccagctactcaggaggctgaggcaggagaatggtgtgaacctgggaggcggagcttgcagtgagtcaagatagcgccactgcactccagcctgggtgacagagcaagactctttctcaaagaaaaaaaaaaaaaaaaaaaaagcaaacaaaacagctgagcatggttactcacgcctataatcccagcactttgggaggctgagacgagaggattccttgagcccaggagttcaagaccagcctgggcaacatagggagatcccgtctctataaaaagtagaagtaaattagccaggcatggtggtgcacacctgtggtcccagctactcaggaggctgaagagggaagatcagttgagcccaagaggtggaggctgcagtgagctgtgattgcaccactgcactccagctggggtgacagagggagactctgtctcaaaattaacaaataaataaataagttctcacaccaccactttgagaagtcagtttctctgtctctgagagcctcagtttccccatctgtatacacaaaggtttggttgcgagaagtttcctttcagtgggcaccggatgtaattcatgccaatcacttgcttgggtttctgttttaacctttctctgtttctcgtctatatcttaaaaaaaattttttttttattgagacagggtcttgctttgttgcccaggctggtctcgaactcctagactcaagtgatcctcctaccttggcctcccaaagttctaggattataggcatgagccaccacacccagctgtctcccctatactttttgatgtctctctctctctcctggtcctcctcctcctcctcactgtctcttccctctatctctcttccctcccatctagatccccaacttataaacatgctcaccctccctgtctataaaaaaatgcatcacttacattgactccacacccaccgtcctaccacaccctacttgctttctcttcaaaacccaactcctcggccgggcatggtggctcacgcctgtaatcccagcactatgggagcccgaggcaggtggatgacctcaggcaggaggtcaggagttcaagaccagcctggccaacatggtggccatctgtactaaaaatacaaaaattagccgggcatggtggtgcatgcctgtaatcacagctactcaggaggctgaggcaggagaatcgcttgaacccaggaggggacactgcagtgagccgagatcgcaccactgcactctagcctgggtgacagagggatactccatctcaaaaaacaaaaagaaacaataaaaaaatcaaccactccacaaaatgacccacattccccagcttccaaagtcctcctggagcagctgcctgtgtatggggaaggcaaaccaaaaacaaaacctgtaggacctcggactcgggccctccaactccagtccctccttcagatgaatgcagccccagccaacatcttagcagcaacctcaggagagactcggccgtgctcctcttttccccttaagaacagaaatttccacggagccactaatgagagtcccattagcacgaccctcatcacctgagttcttttcaattcctcttacctgtgtgatgagaagcaccaagagagcgttgcttggtgtatgtaatgataccatctctaggtctggtgagcaggaaccagagtcaccacagtggggcagcagagggcctgggctcaggtttcccagaagcagagcctgaggcagggattcagatgctcatgaactgtttgagggtttgctttcagaagacagagagtgatgaaagcagtatggggcagaggaaggagccaagtgaggctatcacttcagagggatcccatcacagagacaggatctgaacttttaacctctaatctttgtctatgggcttctccaggggtgagagtttcatgactttcctagtaaaacacgttcctctcaggtcaagagcaagttttttgttttttttgttttgttttgttttcagatgaaatctcgctctcactctgtcacccaggctgaagtgcagtggcaccatcttgcctcactgcaacctccacctcccgggttaaaggattctcctgcctcagcctcccgagtagctgggattacaggcgcctgccatcacacccagctactttttgttgttgttgttgttgtttgtttgtttgtttgagacagagtctggctctgttgcccaggctggagtgcagtggctcgatctcagctcactgtaagctctgcctcccgggttcacgccattctcccgcctcagcctccgaagtagctgggactacaggtgcccgccaacatgcccagctaattttttatattttttggtagagatggtgtttcacc[137 bp omitted]tggccaggctggtctcgaactcctgacctcgtgtgatccgcctgccttggcatcccaaagtactgggattacaggtgtgagccactgcgcccagccaagaccaagtctcttgagaatgtggcatctgcaagcagccaacactgcttaagaatgagtgctcagtgcctgcaaaggagatctgggtgaagcaccagcgacgtccacccctaaagcctcacacctgttaccagtcctgagccagttctcagtcttggaaccccttccatgtagcggatgcttttccctcagggaggactcaccgatactagtcaaagtacatactgtaaaccttcctcccagtttctcctaaaggccaatatccatggtcgctggggattagagaaagagaaaaggctactggactctgactctgaatcaatcctaatttggaggcacacacaggtcaccgtgaatcatggtctgactggtgtgcttggggctgtcaggtaacgaacggagggttcacctaaagaccatcacacagtgggtcaacgggactctaaagaccctgtgtggctccttcctcaggccttgagagtgaagttgaaatcgacattctcataaaatggcagacacaatgctttggcttccctgatctgtagtgtgaaagctttgatggtgggaagaagaaatggaagcccctagaaattcccccatctatattgggccagtctttcattgctataaagaaatacctgagactgggtaatttataaagaaaagagttttaattggctcgcggctctgcaggttgtacaggaagcgtggtgctggcatctgctcagcttctgggaaggcctcagggagcttttccactcatggcggaaggtgaagagggagcaggcacataacatgtcgaaagcaggagcaagagagagaggacgggaggtgccacacacttctatttttttattttattattattaaatttttgagatggagtttccctctgtcacccaggctggagtgcagtgacaccattttggctcactgcaaccttcacctcctgggttcaactcccagctagtttttgtatttttagtagagatagggttttgccatgttgtccgggctggtctcaaactcctgacctcaggcgatccaatgcacctcggcctcccaaagtgctgagattacaggtgtgagccaccgcgcccggccttgccacgtactgtaaaatacccagatctcttgtgagctcactcatcaccatggggatggtactaaaccattcatgaggggtccatccccaagatcctaacacctcccaccaagtccggcctccaacactggggattccatttcaacatgagatttggtggggacacagatccaaaccatagtatcatccttcccaaacagtcaacccagggaatcacagagatcagcgccagcatcaagccttggaaaacacaggggtgggatatgggagggtgattcctaaacattatcctttgattcacatgattaatctatgcaggagcttatggatcttggaagacagaagtaagaaatggtgatactggccgggctcagtggctcacggctgtgatcccagca[231 bp omitted]tcaaaaaaaaaaaaaaaaaaatggtgataccctcggaagtggctggtcttctcagggtaaggtctccttcagcaaatcagcacagcccctggcacctgatattcagctaatgaactggaaaaggcgttttgcctatagaagttagcctgaatgaagagtgttctttactccaacagtgacagaaggtcagtgtgattccctttagactgtctgggacctcggtcatcttatcaacccataagacatcacgctgttccccctcactcctggatagcaatttatcctcactggaatggacacttacaggtgtttattaatttctcagtgatttgttgaatgaatgaaggaatgaatgaatgaatgatgtctttaccttgagattggagttctttcagatttgctctctgcccacctcaccagcctcttctcctatctttactccagctacacagatgtccgtgcatgtttttcttagcactccaggtggattcaaacctcagggcctttgcacacactgttccctctgcctggtaaaatatttctccaccagccagggcctacttctctttctacttctggttgaccccagatacagttggccactccctcctatgtttggagccaaactaaacaaatctcttattataatactcatcacattgtctgtggctttgcctatttttcctttcttttatcagagtggaagaagcttctttgggtagagacaagtctattcatcttgggggacatcaggccaactccacaccgaaggctgatgaaacttcaggcaatatcccttcatctgaatctgatgacgtgtgtcacgttttccaggtccacactcagggatctggtctgcgttttcatgtaagctttctccactctcactttccctggactctcatccaggattagatttttttttttcttttaaatggaatctcattctgtcacccaggctggagtgcagtggcaccgtctcggctcactgcaacctctgcctcctgggttcaagcgattctcctgccttggccaccacgcctggctaatttttgtatttttagtagagacgaggttttgccatgttgactacgctgttctcgaactcctgacttcatgtgatccacccgcgtcagcctcccaaactgctgggattacaagcatgagccaccacgcctgccgcgattagatcattgatctcattgcaggtgaaccagtccagacccccatccaggttttccagcttgctcgctcctcacgctgtggctgtgtcctgtgttgccgtgtttccgctgaatccagcccttgttttcgctcttcctggccttgcgggcagccaggattgaaagatccaggaagtgacaggggcctgactcatcaacttgtaagagagctggggttctcctagatccatgctcgcactgaggtgagaaatgagaagccagggccgggagcctcctgggggttggctgccaacgccaggcaggcggggaatggtgattttcgcttgtatcgtggaggatgccacgcacagacgtgaatagaaagagcctggaccgtgtcctgaggtcagcgactgaggtcctgggtggggccagccaggacctgcccgggggctactgccctctgaatcaatacctccagggaccctacgttgacacccatggcctcccactctccacccctcagtcctgcgtgcggcacgtagtgctcactgggcgtctgtgtagggggttgaaggctgaggctggaacaagggcgtggcggtcgcaggctccagggcacgacggtccttcctcttccccttctcagccacatctggggctccgtccctgcagccaaggctccctggcgctgtccttggtgctgacgcggttctggaagtgcggtgccagggtggctggtgcggctcccgatggaaaagccccaccaaccccacaaagcagactcgggagagaacacgccaccgtctttagcgaatcttaccaacccagggccaaagcgccctgcaccccagagcagcactcgtggtgggaacacaggctgatgtaataaacagaaaagtgactgcgggggatggggaaggcgggatgtccttagcgtcccatggaaaaaacatatttcctccagatg[156 bp omitted]cgtctctactaaaaagacaaaaattagccaggcgtggtggcaggctcctgtaatcccagctactcgggaggctgaggc[137 bp omitted]tgagaaaattccatcccccattgttcggaacccaggaatctgggcgctgtgtggttttccataaaaactggtatattcgtttgctagggctactacaacaaagagcatagactaggtgacccaaacagcagagatttgttttcccaccgttctggaggctggaggtccaagatgaaaatgtgggcagggttggttcctcctgaggcctctttctccttggcttgcaaatggccgtgttctcccttgtcctccatgtgtctgtgtcctaacctcctcttctgataaggacaccagtcaggttggattatggcccaccttagtgtgacttttttttttttttttttgagacagcatctcactctgtctcccaggctggagtgcagtggtacgaacacagctcactgcagcctctacatcctgggctcaagtgatcctcccacctcagcctcctgagtagctgggactacagtggcacatcaccatgcctggcttacatatatatatatatatatatatatatatatatatatatatatatatatatataatgtatatatatataaaatgtatatatatgtgtatatatatataatgtatatatatgtgtgtatatataatgtatatatatataatgtgtatatatataatgtatatatatataatgtgtatatatataatgtatatatatataatgtgtatatatataatgtatatatatataatgtgtatatatatataatgtatatatatataatgtgtatatatatataatgtatatatatatttatttatttattttagaccgagtcttgctctgttgccaaggctggagtgcagtcccgcgatctcggctcactgcaacctctgcctaccaggttcaagcgattctcctgcctcagcctcctgagtaggtgggattacaggtgcccaccaccatacccggctattttttttttttttttgagacagagttttgctcgtcgcccaggctggagtgcaatggcatgatctcagctcactgcaacctctgcctcccgtattcaagagattctcctgcctcagcctcctgagtagctgggattacaggtgcctgccaccacacccacctaatttttttgtatttttagttgagatggggtttcaccatgttggcc[131 bp omitted]ttggccaggctggtcttgaactcctgacctcaagtgatccacctgcctctgcgtctcaaagtgctgggattacagccgtgagccaccatgcccagcttggctaattaaaaaaaaatctggggagatggggttctcaccgtgctgcccaggaagatttcaaactcctgggctcaagcaatccatctgcctcagcatctcaaagtgacctcattttatcttaatcacctcttcaaagaccctgtctccaaatacaatcacattctgaggtactggaggttgggacgccaacttacaaatttttgaaggaggatgaaattcagttcataatagcagggatgagctttatgccccctgaaaaagacatacttccccaggtagattcatctgttagtgttttttgttttgttttagacaaagtcccactctgtcacccaggctgcagtgcaatggcacgatcttggctcactgcaacctccacctcccggattcaagcgattatcctgcctcaccctcctgagtagctgggattactggcgcccaccaccatgcccagctaatttttgtattttcagtagagatggggtttcgccatatgggccaggctggtctggaactcctgacctcaagtgatccacctgtcttggcctcccaaagtgctttcttttttcttttttctctttttttttttttttg[216 bp omitted]agcctcctgaagtgctgggattacaggcatgagccaccgcacccggccccaaagtgctttcaaagtattgattcaaaactatggcacaatcccaaccccacccccactgctcagaacccagggagcattgggtttggtagattccttcttccacacccagaataaattttctcagctccattccccaaatgatgctgacttgaggcaggggaagaatgctttggtagctcaggggaaaggactgtggagttcctgtctttccctcttccaagatccaagggtgctagcgacctttctgtgttcatggtcagaagcaaggagggagaaagaccaggaaccacacagctctttgtcatctcacaggcaggaagcatccaacagaggccagctctggggggcatgctgggccacatcatttttgccagtgtcctggaataaggaagtgtaggatagtgaggaaggcagaccgtggggctcctccctaccatgctcatcagggcatccaggtgagggatgaagctgtcctaaagtctttccagaactcacacacacgtgtccccacctctcccctccttgatcatgtctccattttacgtatttactgatcatcttctgctattgttaaagtctaagctgaggggtgaaaccacagcagaaagcaaggaaggctcgaccccagatcacacagggagaggtggacagacagcatggctccgcccatttgcagccatttctgggcctgtaggctctggcagctcctgggattgctgtcctcggtgctgaatacgcgtttgttgggggcacacctgacaagtttgtcattttcagggaaaacccagtctctctcggcgctgaggagaaaacatggcacagcccttctcagtcctctagcaaccctggactctgcaggagaaaagagagattccctacatttgtttctatgagagaagggaaggctggagcaggggagtgggggaaatctctgcagtcctctcggaaagcaaacccttctacacctgtgatcccatgtgatttagcagagccctgagttaaaactaggccatgatgacacttggtgacacaaacatctgacaaaagagctgtaccctttatattttcaaagactttctacaaattaaggaaggcagaagacccatttaatgggcaatggacttgaagagacactttaccaagaatatccaaatggccacaaacacacacacatacacacaaatgggaatgtgttcaacttcattagtcattatggaaattaaaccacaaggaagcaccagaacactgcagcagaagaactaaaatggaaaagacgaacaaccaactatctgcaagaatatggggcaaatgaagcttcctcacattgctggcaggatggtaaactggtaagctgctttgagaaatggtttgtcagtaactacgaaagcctaaggtacgtataccatcactcagcgattccactgctaggcagacatctgagggaaaaaacttcctgtgtgctccaaaagacatggacagaaatgttcatggtagcttcattcatagtatcccaaaactagaaacataaaatgttcatgaagggagggatgaaacaataagttgtaatacattcatgcgataaatagtacacagcaataaaaataaaaacacccagcatggatccacatttcatccacaatgttgagtgaagaaagccagaatcaaataactacatactgtataattccacttagagaagtttcaaggacagactacactaatttacgatgataaagatcaggagactggtcactcttggggaagggaggtacaaactggaggggagacaggagaacctgctaagatgcagaaaatttatttttttttaattttatttttgagatggagtttcgctcttgttgcccaggctggagtgcaatggtgcgatctcagctcaccacaacctccggctcctgggttcaagcaattctacaggcatgcaccaccacacccggctagttttgtatttttagtagagacggggtttctcc[143 bp omitted]gagtgcaatggcacgatctaggctcactgcaacctccacttcccgaattcaagcgattctcctgcctcaggctcccgagtagctgggattacagtcatgtgccaccatgcctgatttttgtatttttagtagagacagggtttcacc[139 bp omitted]gagcacagtggtgcgatcctgactcactgcaacctccacctcccgggttcaagtgattctcctgcctcagcctcctgagtagctaggattacaggcatgcaccaccacgcccaggtaattttcttgtatttttggtagagacagggtttcatcgtattggccaggctggtctcgagctcctgacctcaggtgatccacccgcctcagcctcccaaagtgcagggatttcaggcatgagccacctcgcctttcagcccacacaatgaaggtttatgaagccccagattccagggcctccaccacaaccccatctctgccacacttctggtcccactgggggccgtggtccctgcccactggacccagtaggtgtaggtgtgggggtctgggccccggggggatatacaccttagtgtaacagaactcagggtctgagcctgtatcctcagatccatgacctggccgggtaaggaaaggaagggaagggggtcagggttcctgcaggaaggttatctgagtggccttaaacagacccagttgtctcttacttgtagttctcaagagtaacagtagaatgtgctgggaatgcaacatccggagatatggagggactggccaggcggcctgggctccattcctgcctgccctagaaacaggatgcccttcaatgcttgagcccggtgactcaggtttcccccagagtagaaaacccagggctgggtactttttggggtccctcagctgccatacaagtgaggcacacacagttgtgaccctatcctccctaggccactttcctaagccttgggggaccagcttacaacggaccctgggattctgctgtcccttgctgcccatctgtgagaaacaagcccacttcatgtaactttttgcgtgtggcgttctgtctcatcactctggcaagttggtaaccagtgcacagtgaacctgcttcacagaccacaccccatagtccctgggcctccagagcaaagggaagcatcccctccttcccacagccctgcttgctctggaaggatgcaccctatcagtggggccgatgccagaggcctcctgaggcctcctactccccaagcccagagtgctctcacccctcgcccgtggcctctgtgagcgtctggctggggctgttgacctcatgcttctgggcccacatgctggggtactgcgtccctgcagccaggccctccacaggcaccctgatgtctgaggagtcactggcccagcagagccagtaggggcaggtcttggagtctgggcctgcggggccctcagggtgagggagctggtggtctgagccggtgtgaccaggccagggactagtttgggaatgtggaaaggagagagtcatttgataaagtttgtttgtggctctaatgagaataaagtgcacagcctggcactttttacaaatgtgcacacgcacgcacgcgcacacacacgcaaacacacatgcacacacaagtgcacgtgcacacacacgcacatgttgctgggcagtggaaaggtggcccctcttacctgtagacatgctcaggacgtccctggggccacctactcctttcttcttggcccacacagaggtggtgtagagggtcccaggctgaagccctccaccacgagccagcagtgtgacgtgcttgtgttcccgctggccatgcccctggacccagtagatggaagtctgccggtctgggcccttggggctgcccagctcagggtgatggagctggaggtccgagcctccacactcacgattctgtctgctttggcggctgacatgggtagaagcctctgcggcaaacagaagacggaatcccacggcccttcctagacgtgcaggatggaggctgatggggtcactaacctgctgctgtggcctctgtcgtggtcccgagggcctggggagggcccagatggggaatcagacccacggtggtctgacctgcaggatcgggatgaaggctgctgagtcccaccccgcctcatccccaccagccaccccggcttgggagggaagatggagccggcgttttgccccttgccccaggtctgggtcccggcagggctggaaggagcctgagagggatgtgcgcagcacctccgagagtcccgctttagagaaacacgaatcagatcatgagaaagcagacctctgagaagtcagatgaaaggtcgtcgggggaccagaatcagggaggagggacacgacgctggggctgctggatgccgacaggagagcagcgtcccgtcgctctggactgccgaccccacagagcccagggaccaaaagccagaatgttccccaaacaccagggattatgggcccagcccctcctccctcagactcaagagtccaggcccccagcccctcctcccacagactcaggagtccagcccctcctctcccagacccaggagttcgggcccccaggccctcctccctcagactcaggagtccagaccccagcccctcctccctcagacgcaggagtccaggcccccagcccctcctccctcagacccaggcccccagcccctcctcccccagacccagaagtccaggtccccagcccctcctccctcagactcaggagtccagacccccagcccctcctccctcagacccaggagtccagacccccagcccctcctccctcagactcaggagtccaggcccagcccctcctccctcagactcaggagtccaggcccagcccctcctccctcagactcaggagtccaggcccccagctcctccctcagactcaggggtccaggccccagtccctcctccctcagactcagaagtccagggccccagcccctcctccctcagacccaggagtccaggttccagcccctcctccctcacctccaggaacccctcatgtctgcaggccccacgtgcccctggaatctgcacacccagacccccgtccctcctgctacacttcactgcgcaatttcctctttccccacctttcgccaggtctgagtggagagggtaggagatgaggaggaagtggaggtttcgaacctgagtccaatccttcagatcctcctcatgcctgacccttcctcaaggaaatccctcagcttccacttctcctcactccaactgtggattcctgtcctcactttccttcctggtccccgtcctccaggctccccaccttcccttcccacctctgtactctcacatctgagtccctaaatgcaggtcatggatggagaagtcacctctctgctgtaagagtccctaaatgctggccatggatggagaagtcccctctctgtcgtaagagtccctaaatgcaggtcatggatggagaagtcacctctgctctaagagtccctaaatgcaggtcatggatagagaggtcgcctctctgctgtaagagtctctaaatgctaaccatggatggagaagtcgcccctctgctatgagtcactgaaagcacatcatggatgcagaagtcaaatagggtcttggagagcagcttggaccctgtcaagtcttcagatgcagaatctgaggacctgagggatagcagcttgccgaggtcacacagccttgacaaggagcacagctgggttcctccttcccatttgattcctacccccttgccgccctccctcctccaagacccctcatcctcaagcctcccacccttctcccgatactgcatgtgactgcagcgggttgtatcccctagaaagatatgtccaagtcctaaccccagatacctctgcaggtgacactacttggaaataggggctttgcagacatacttaaggatcttgagatagaatcaccctgggtttagggtgggccctaaatccaatgacctgtgtccctagaaggatgcggacacagagggaggctgccagttgaagacagtcacatgaagacggagagacacagccacaggccgatggaagccagggattcccgggagcctccagaagccgagagggcaaggacggattcttccctggagcctcaagagggaccatgggccggaaaacacccggattttggactttgggtctccagaactgcaggagagtccattcatcttgtttcaaagcatctggcttggggtaatttgtgacagcagcctcaggaaactaacacaaagaccaaacagtcctcttggctcagttctgcacaatcctcactttatccccccgaatccccccaccagagggccatggagggtcccactgggcaccaggcctggtccatggggagcgacaaagaaccttctgctgtcattaaccgcgatggtttatcacaatcatgaccctccccgaggcctctcctacggtaacagcaacatctacggttccacacccacagggaaaacggattcagagcagcagcagggggcgggcaggctgtggggccgacagtgaacatggaggcaggctggtggctgggagggctccatgtgggcctggctgaggagccagggatctggagtcagaaccgggggaaggcagctggaacccagtagtggacttggaattccgcaaatcgtcctcaaacgtcttcagccagaagcgacggcggcagcggcgcctgcagacaggcgtcaggaagcttcgctgctgagggtatttctcaggctgggctgggctgggaggcccaggtccttgcaggaggagagggcctgaacaccggcccttcaagctccctagtcagtcagtcttgggcaccgggctcctgagggctgacagtgtgatgaggagctgggcagcatagtaggtggtcatgatcaccaggtgggcatggggcaggggctgggcgaaggtgtcccaggccagcacgccatcagagagcgtgaagagcagcgcgccccagccggcactcccgccctgggccaggccgcgccacagcatggccatcaggatcagcccataggctgccaccggcaggaccatatccggctcgaggtgctggagcacaaggctgaggtaggggccaggggccaggatgatgagcagcagcaggccgggctgcaggggagagaagccgaaggcccagacgtagaggaggtgggcggtggcaaaggcggccatgcctggcgggagaggggtggggtaccagtgaggaaggcccatcctgggaatggccccgaggtcacccctcagggcctaagagaaggaccatcccagagcaccaggccccaccctggccgagcctccttgcaggtctccccacatgcagtgtccatccttgctctgctcagaactgccaggaggccccaccttcccttggcctccaaagccccatggcctccagctctccagccactctgcgccagccaccctggcctgctgggctacaagcacctgacacgtccctgccccggagcctttacactcgcccttcctccacacaggcatacagcccttcagctctgcccaaatgtgacttcctcagtgaggccttcctcagcaaccctgcttcaaactgcagtacctccagcaggtcctcactgccctctgcgccacctcagctactgccctaacaccgcctgcccccacccctcgctggagcgtgagctgcctcggtcacggctgcgccccccactgtgcctttgaccactggagctctcacaggagccctctgcacccaggctcccatccaagtgctggggcctctctcacacgggcatctggaaagcgtcacagcaccttccactcaccagggacgaaggctgccggccagatgaggcaagcgtcccccacagccgagcacacaagggctccctggaggagctgggtgtagcccccgcttggggacatgacccacaggaacccagccaggcagaggacgggcaggcacttgaccagggcagcgaaccaggacagctggtcctcgggaatccagaggcagaagtacacgcagcaggagaggatgaaggggctcagccacctgcagacatctgggcgctttggggagtggggagctactgagccgaaacccagcccagcccccattcttgggactcagatctcatggctcctgtcccacccccacctgggaccccagctgtacaggctggacccattcagggaccaggctgccagaacccagcttcccagggcccaaccaactcaaggacagcagctcccagacccgccggctgctggggttccagggccctgtccccccagccccaggcacagctcagaaggctctcacctgggctgagcagtgagtcttcagggtctgccccgctttgccagcgtccatgctggcctgatagccccagagcgacctaatctgggagcgagtggcttcagggggtggaggggagggctcatggttacacgttaacccaaggagcgtcctgtggactctgtgactgataacagggcccagggagatgttgtcctcaccctggggatggccctgcctggcgcccgctgataaagcactgttggcactgggggtccctctgccctagcctgctgggacatggcttcctcctcctatctgcctggggaggttaggcccacaaatgcctgtccccttgtcctgggccccaacaatcagaagagatggggtgcagaattccaacagccaccccatcatgggaagcgggagaggggctggctggcaggagtgcccctggagggatgggaaggcgagtctgtccttcacttgctgccctagccgtctccctccctgctccatgaaacctttcctcattctgctcaaccccaccaagccctcaggggctccaccacaaacactgcttcaatgggtgaccaggagggaccaccacgaatgcggggaacaagcaccctctcctgttagctgagcgagcccccaggtgacctccaagccaactgccaccccagtgaggacgctgtcctcatggcccggtccacacgctccggtttcccagcgccgctcaccggtgccactcgctgcacacgcagcctacacttctaccttctacctgaaagactcagacctactgggcgccagtacccagcctcaatgctgggcttggttactgggggtaagcaggggcaggagcagggatttgagcctgtcggtggcttctatcctctgcccaaggccctgcccacaggtggggtagacctggcaggagccctcacagccagtgcctggcccagcctggggcctctgcagccacagggctccctctggcaggacagtgtgggggcagactgggtcaggagcacccccagcctctggggtgcagggataatacaggctccccaccccgcatcccagaacgtaaggtctgaccagcagaatcgtaaactgccttcctttatttatatttgcaatatgaaatagaagctcggcacaaacgcacgcacactcacaccagcctgggaggagggagctggggacaaggtcacttggcaacagggctgggacctcagaccctcaaggcccctggggctgttgccggggaggcccctgctccccagagccggactggcctggttgaaagtgcagggtctgggcaaaggcacggcccccactcgggaccctctggcacccccacccacgctgggccgtcccccatggtggacctgagctaaaaggccgggtgtgggcgtggccgtctgcgctgcagcgtgggacagctgggcacgtgggtggcaaccttgggacccctaacaccagctcccgctgggacggaacagggaaggctgtgctttggagccgccagcccagttcggtgtcctcactctctctcgctctcctccctctctctatataatatataatatatgtttctctctctccattctctctatttgactctctgtatctttattctaggaggcaacgctccaaaacttctcttctcagtgcaaatgggggtgggttgggcctgtctccctggcaccagcctcctgggggtccagaggagagaatgtgggggtgtcagggtgatgagggcaatgggggccatcgtgggacccgccctgcccccaccccgggagatccacgggaggacggaagatttggccgccgctgccgcaccaggcagctatctggaaacagagggagatgtcgtgtgagggtctagcaggcccagccccacctacccagcccgaggctgcagccacactcactgggagcctggggatgcaggcccttccggggcagagccattgggtatcggaggaggcgtgagggcctgggcactgtcaggggagagaggggatgtgcagaggtcacttcctgccccaccagccccacccccacccccccgccctgctgccctggtgctcacctctggctttggggaagccccaagggctctgggctcttctccccttctgtggtctgggggggctggtgggccccggaggctgggacagaggtagaggggtctctggttgcactgtgggtgagaggcaggtgcggctgtcagcgtggcccccaccgtcacctgctgacaccctcacatcccacccgactgaagtcggctcactgggtgtgtgtctgccacctgccccacggggaggggcctcccgaggacgcagctggctcagcgtggagggacagcacagccctggacaggaagacaagcacccctcttcccgcctcctgtccctgtggaggaggtactcgaggccggctgagacagccccaaagggtcttctgcatgctctcaccctcccaatccttcacaccctccaacgagcccttcccaaccctggggctcaagggccccaagcatcccaggctactaagagaagaaccagcctacagagtgcaaggggctggggcacaacatgaggctgcgcctgggggtcctgcaaaggaggcctggagcagctcagggacaagatgaacccagagcccacctcagcgaagaggagaaaagacttctcccgatactaggcagccccacctcgctgctcacctgtccgaggagctgggggcagaacggatcccgtggaaggtggcctgaaggtccccgatgctaaccaaggcctggcaaggggctgtgggggataagagatctcagctgcagctcccagcaagctcggagctggccaggctgctctctctgcccagggccgcgggtgggcagggcaaagcggggctcacctgagggctccgtgactttgctgccttctgtggcttcctgaggtgctgaggggggtgtggggtcctgagacctggtaggcgagagaggcagcccaagggggcagctagggttagcactcgagcctatgagaggacggggaccccatggccacctcctggcctcgggataccagcaccatttagcccgttccatccggttctcacctgagctgcagggcgtcacgggcaggagggctggccaggctctgagtggggaggccctggggcacactgaggggcccctgtggggctggaggcccagtgtgcagctcttcctccccggagactcgggggctggtcggggcatctgtaggcactgggtcaaaggtggctgtccagctggggcctgggatagaggtgggggagcgggatggagggtgaactcagtagcaggcagacagccctgtgtacacctgaccacaccgcccattcattcacctggaggctgagggccagggctggggtaggacagaggggtggcccctccacgggctgcacagccaatgccctcctcgtcttcctcctcctcctcgtcctcctcttcttcgtcctcactgtctgtgctgcctccactcctgccccagaaaccacctcgtcagctagctgtgtgggacagaccggccgacacccatcctgttccctgcagcccagggtcagcccaaggagagcgggctgggatgacaggcaggtcacagaagggtccagggagcctggggtgtgacgacaccaggagaggctgggagagggagttctgagccaacggcaagaacacaggcgggcagggacagaatgcggccgtaaggagaccgtccgtcgccagtcatccgtggagggcaggccctggggaagtgggctgagcctcagccatggcaaccagagcagacagacccactcaccagctctcaagccacctcccagccgtcacctcacacggtcaccacagtgacaggccttcccaccagcaggcccaccctctggacagaggcttcacactactctctccctccaactagaaactccaagaaggcagagatggctgagttttgccactgctgtatcctcagccctgagaaaccaccaggcacccatagctgctccaaaaacactggctgaatgttgactaacacacacctgtgagcatgaagaaaatccaagcaacctacgtgctgatcaaccggggaaggggtaagcaaagtaacactaaaactaagctttaacaacgagggtgcactctgaaaaacgccatcattaggcgattttgctattgtgtgaacattctagagtgcacttacacacacctggatggtggcgcctcctgtacacctaggctctgtggtatagcctattgttcctagactaccgacctatacagcatgttacagtactgaatactacaggcaattctaacaatggtaaatgtttgtgtatctaaacataggaaaaatacagcaaaaatagaggattataatctcacgggaccactgtcatatgtggtccatcgctgacccaaagatgcagtatgggactatatactatgtctaaaatgctgacccaatatttttgtcttaacagagtaactgactactttaactggaaagtaatatatctgtatatagttaaaagtaaactaaaatactcaacgactaaggagtataaaggaagcccctcaacctaacataaggcatctacaaaaccccacaactaacagcatgcttacatggcaaaacgctgaatgcttccccctaagatcaggaacaaaacaaggatgcctgttcttgccacttctgttcaacattgtcccggaggctagccagggcaaccaggcaagaaaaggaaattaaaatcatccagatttgaaaggaaggaaaatgaactctattcacatgacatgattctgtacatagaaaatcctaaggagtccactaaaactatcagaactcatacattagttcagcaaggttgcaggatgaaagatcaacatacaaaaacctattgtattttcatatacttgtaacaatctgaaaacaatttcaagaaaattccatttacaatagtaacagaaagaagaaaacaggaataaacttaaaagaaatacaaagcctcatactctaaaacctacgaaacattgttgaaagaaattttaagacctatataaaaagacatccatgttcacgtattagaagacgcaaggtggcttcttggttgaaattgacaagctgatcctaaaattcatatggaatctcaagaaatcccaaatagggcaaaacaatctttaaaaagaagaacaaggttggaaaactaaaacctcccattttcttttttctgtgagatggagtttcgttcttgtcacccagactggagtgcaatgaatggtgcgatctcagctcactgcaacctctgcctgccaggttcaagcgatattcctgcctcagcctcctgagtagctgggattacaggcacccaccacagccggctaatttttgtatttttagtagagatggggtttcaccatgttggccaggctggtctcaaactcctgacctcaggtgatccatccaccttggcctcccaaagtgctgggattacaggtgtgagccaccgtgcccaacaaacctcccattttcaaaacttactataaagcaacagcaaccaggccagtgtggtactggataaaaacaacacacagactgatagaacagaacagagagggaagaaacaaactcatacatatggtcaaatatttcctttttacacaggtgccaagatgattcagtggagaaaggacagtgtcttcaacaactggtgcagggaaaactggttatctatatgtaaagggatgaaggtggaccacctcacatcatatacaaaatttagctcaaaatgaatggaaaaccatagaaataatgctataaaactcttagaagaaaagagagggctaagtcaagatgctggatttggcagtgacacacttgtgcaccaacaacacgtgcaagggtattcacagcggccgcactcacagcggctgcactcacagcagcgagcaacaggaacctgcccaaaggcctgtcaactgcagaacaagcaattcagctgcagctcatcatgcatggcactgccccactgcacgagagccaggggcacccaaacacacaacagggaaggagctcacaagcagagtgttgagcaacagaggtcagacataaaaggagatgctgtatgctatatcaagtgaaaacagagacaaaactcatctacagggttagaagccaggacaactttaccctcagaagggaggatactggctaacagaggggatgtgggtactgggaaggtcctgctcctgggtctgggcactgaggaaggatatccattggccacacactcaggatctgtatgtacacttgtctatacgcatgttacatgtcaataaaaagtgaaaacagcctaattccgaaatcaaaagtcatgagtcaaaaactcagttgcagatgatgacttagtgttcaggctgtcaaatctacatggcatgaacccatttcatcacagcgactctggggccggccagtattaagagaaaaaaaaaaaacaatgtaacatttgcactaaaatgtcatcacagcctgattggagagggacgtcatcatctctcattttactggaattagagaagagagaagctgcctgggaccatcttacccccctttctaggaaaacgtgtgagagctaacacgaggaagtgaagtgaagggatgaaggaaggagacagggaggcgggaagagagagacacacacagaccaagccatacctcaggacctgcctattttttcagccacagagattatcccttt[136 bp omitted]cattctcctgcctc[223 bp omitted]ttgagaccaggtctctgtcacccagactggagtgcagtggtgcgatctcaactcactgcaacctccgccccccagggtaaagcgatccttccacctcagcctctcaagtagctgggactacaggcacacgtcaccacatccaggtaatttttgtagagacagggtttcgctatgttgcccaggctaggtctcaaactcctgagctcaagcgatccatccaccttggcctcctcccgaagtactgggattacaggcttgagccactgtgcccggctaatttgttgatttcttaatgcatcatctacctttttttttgagacaagtctggctctgttgcccagactggagtgcagtggtatgatctcggctcactgcaacctctgcctccctggctcaagccatcctcccacctcaacctcccgagtagccaggactacaggtgcacaccaccatgcccatctaacttttgtattttttgtagagacaggatctccctatgttgcccagggctggtctcaaactcctgagctcaagcaatccatctgccctggcctcccaaagtactgggattacaggcactcagggattacatgagcccaccatgcttggccttgaattagatttctatcactcaaaagtgaaagtgcccccaactaatacacacaccaatgcaggttccttattttcttcattcacttcagcctcagtccaaatgtgttggggggaccccttggccctgccgtgtggtggaagcttggagaagggaaactggagggggactcaccggacaccaggtggctggcccagacgggcccccctggccagctggctgccctgccaggcgccatcttctccatcagactcccctgagccctgggcctcttcctcgtcctcctcttcctcatcatcatcaaactgctggatgcggtccttgtagcatatctcaagtaggttggcgttgggctgcagggcacaggggtgggaggatgggccacactgcccacagccccacacccctccacccgccacaaccaggggacagggcagtactcacgttctcatcgtcagcattgagggagaaggtgatgttggctgtcttgtcaaaaggtgcgctaggagagaaggcaaggcatggtgagaaggtccacctgggggtgggggcagcacaggacaggccacatttctttcttcactcaacacagagctgaccctcattacttgcagatttggtatctgcaaattcacacacaacccgaaccactggtcctaaggggcaacgcatacatgaatatcaacatctcacatatgatcactttaaatccttaaaaccactcattgaggtaggctgtttcccttggctctagaagtgagaaaatggggctcggaaatgttaagcgactctcctcaggctcttccaaggacaggtgccagagagggattcagatccatgcccttgtccccatccttggggcatctgtaggaggctgacactcacaccagccaggcacaagcagaatgtgagactacagcccaataaagcacatcccctaacctcaagatgtctacggtccgcggctgaaattctaaattatgggaaaaagaatcacgtcaaaacttaaactgtgcctgccagggccccacctccctcaccacgagggtctaatgatcagggtccacattctgtcccacgtgttacggacagttcaagggatcatttgtctcaaattcatgaaaaattctgccacaaagatcaatggataaaggacagttaattcttaaaggacactaagtatgtgacagacattactcacgcacttcattctcacaaccaccttccaaggcaagtgtccttagtccctcctagacactgagaagcagcggagcagagaccacgctgggcacacagtgggtctagggcagggcagcccatgtccccgtggcactggcagcctcagctgacctggcttctgctacaggagctatgcggggcagcatcttcagccttgagatgatcaaaccagtcatccactttccattccggaaatctttctgggtttagttttgttcacttaacttcttaacccctctggaattttcttggtagaggaaaagctaacagtttcatcccgaaaggggcagctggtgaccccaatgccatctaccagtcagtcccttcattctcctgccagggtggggttttcttctttttttttttaattaaaaaagcagagatggtctcacaatgttgcccaggctgggctgaaattcctgaactcaagcgatcctcctgcctcggcctccctaagtgctgggattaagatgtgagccactgtgtccagcccagttttcacttgagcatcttctccaggggtctcggcacaggccactgacccacaaagaccaacgctctgcaagtctccatgctgggcacagaagcagccaacacaggatatcacgtctgcatctgagaggacctctgtccagctgtggactaagccaggaacagctgactatccctcatcgtggtgtcccttacgctgtgctgtacagggaccccggggcagccatgggcagccatccagctcccacacactaaccagctatgtcctggggcctcagtctccctggccgtaaatgagctcatcgtggggagcaagacagagtctcgctctgttgcccaggctggagtgcagtgggacaatctcggctcactgcaacctccgcctcccaggttcaagcgattgtcctaactcagcctcccaagtagctgggactacacgcacctgccaccacgcctggctaatttttgtattttttagtagagatggggtttcgccatgttggccaggctagtctcgaactcctgacctcaggtgatctgcctgcctcggcctcccaaagtactgggatcacaggtgtgatccactccgcccagccacttttttctgactccagaagcaacagatgcttgtggcaagaaactcagaaaagttcatgatcataacacccagaggtgactgatattaagatgtggttgacccacaaatcaaaacaagcagaattggtaattggaaaaaaaaagttttgttaccccgaggcctgtggaggggaaaactggacccccatgtctggcagactcctgagccagagggcatccatggaggtgcagctctgccccacagtccctgcgccaggactgctggtccccactaccctgagcccctcccgcctggaacccctaaggctagctccaggagtgggagggacccgctctgtgtccccagcacagaagatgtttgtgccccaccctcatggcctgcctctcggagagaagagactgcagagctggaactcatgtaacaggaggcagacacacgaggctgcagacacacacacaaggccacggccaacgcgtgcccaggaggggccacagctgcaggctgagcccacagggcatgtaggtgcgtgcaggggacagatacaagtaggcgcgcctgctgctgcagaggcaggacagggctgtgaccctgcgcaggagacactcacttcacactctcctcctgctccccaaactcctcatcattgaagccgaagtggtcaatgaaggcagaggtcatgcgctgcatctggaagtccatgaaggcctgtgggggtgcggaggttagggctggagggagttgggcaggaccccactccagcatagcccagcacagccccacatagccccacgcccacctgctgcagcacagcctcctcagggaagttgaactccttgagccggtcgtcctcatcgtcactggaggagtgtaggtggtgggtgttcacctggggagaggagggggcgtcagggcctgctggagcccccagaccagggtgggcaggcagctatcggtggcggtgggaggctaagactggcccaagagagagaagcagcaggaggagtgcaggaagagaagctgggcctcaccaggtccaccatgttcttcttgttggtctccgccaggggccccgatacgaaggcttcccactgctcctgctgctcgctgggcagctctgcttaggtgagaggggtgaagacgtgaggcatctcggggcttcaagccccccacctagccctcaggccggcctggggaccctcacccttcagcagctgccgcagctgctctgcattgggccccttctccgtgttctgcaccagggcaccggccactcttgtcaggtgacccatgtagcctttccgagggcctcccgcacacctggcaagagtgaaggccgcggctgcaagccaggactggacccagggatgcccagccccagcccggccccccatccaggcagccccagcccctggagacatgaagggcagcaggtgctcactgtacacggtcgttctcctcccaggacgtcaggatccgctccaccaggcggcactgctgcagcagctgcgggagagcgggacaggatggcctggaggggtggtctgcacacatgtggggagctctgcactgcagcaggggtcccttcctcagcagatgcttcaccaggcccccgctcatccagagacggggatgggaaggagggatgcaagctggggcttgggaccctggcatccacccaagtctctctggtctttctacaaaagaatatgtggtgcatacacacacacacacacacacacacacacacacacacacacacatgcatgcactaacggacacacacatgctcacacatacatgttcacatactcgtgtgcactcacacacatacatgctctcacacacgcttgcactgacacatgctcacacacgcacgtgtgcgcactcatgcacactcagctgctcgcaggtctgctcccgcccacccctagctcttcagctcaagtcaggagcccactgctccctgcacctgcatgtttcatccgcgtttctccctggccatgcctcccacaccccatctgggcgctggcacctaacactacccaacaaacacttgtgggaggaaggagtgaggggtaggcctctggagagggtgcgcccacaggggatgggcccagaaggagggggaccagggagtcccagctcacatgtttcacaacagggttttggatgggcgtctcagggctgctgtcaggaggtggccccaagctcagcatggtgctcacgcatccctctacttgggcatgcaagaagttgttgaagacataatggaagaagaggtcctatgggaggacacaggattggtaccagagaggccccgccccagccgagcccccaacccctgagcccccagccgagcccccaccccagcccccgaaccctcagcccagtccagtccccgccccagcccctgaacccccagcccggtccagtccccgcaccagcatggtgttgggcacgtccagtgccaggagctcgtgcgtcagggctgcatcattggcgctcagggcactggccaggagcttgaccacgtgcagccgcgtgttgcccagaggcggagccagcatgccccatgtcatctgtagcggctccagctgcagacacagggaggcctgattcccaagggctgcccttcctgcttcccccgcctccccgaggaccagaacccacacccctgaccttgggaggctccagcaggagctggtggaagcagctgagccgcgggcgtagggcgtgcaaggcgcccacactggacacagtgctttccagggccccctgggccaggagctccagctgcccatccacactgctgaagaagctgttcacggtcacggactcggacctgcagcagggcagggtcgaaggcggagtgagcctagatggcctgtgcgcccacacaggagtaggcacaaggaccacgtctgcagggtctggaggaaaacgaggagccacatgcccccagcgccgctctcttctgaggcccttcagacaacacctggctggggtggggagcccgccaggcggcagcattggcagtccactgtgagagcacgggtgaggggtggaggcgggaaggcaaacccaacaggctagcggcctgtgtggtaaggcaggggcacgggggcctggggtccctcccaacacaagctgcagcagtggcctcagcctcagtgccctcacttgtcaaagcagacaagaagattcctccctcggccccgtactgtccactgtgcagggagcacaggcagccacagagcaaggtgccacgggcggggatttctcttggtggacaccgagacccgcctctgaggggccggagagcccctggggatgggcagcatgcatggtctgtggcccgtatccctcacctcggcctcctgggctccagcagggtcagcagcacctggatcccactgacgatgacagactggctctgctccccctcgaacatgttgcttaagagctgctcaatcgtctcctgcctgcgggggcaggggcaggggtcagggtgaggggccaggggcccagggcttccccaagtcagctccccccagccttagccttgcccgcacacccacttctccagggtggccagcagttggtcaggctctgggctgtcctggacttggatcatctgctcccggctcaggcggatgatgtcacacagggactgggatgcgttggaatgttgctggaacggggagagacaggtgaggatcctggtcgggccaccgggccctctgcagcctggtgctgggagcccctcccatgagctgaccatccagggaaaaatggtcacccagacacagggacacgtgttacgaaggaggagggcacagaggcaccaactgctggagggaagatggtggagagaacaggaagcccggaaggctccccaggacaggaggcatccacacaaggccctcatgaccgcatacagggctggcagcaccgcccacaatgacccagaaggctctgactgatgagtgaatatgcccaagctggtctatccacacaggagagtgctaatcagccaggaaaaggagtgaaactgatacatgcaaccacatgaatgagccacaaaaacatcatgctagagaaagaaaccacacacagatcacgtagtacatgattccaattatatgaaatgtccaaagacaaatccacagagacagaatagtctggtggttgccgggggctaagaagagaaaggggaagatcaggaggagctgctaatgaacacagggcatcttttttattttttctggagaaagggtctcggctgggtgtgat[145 bp omitted]aaccccatctctactaaaaataaaaaaattagccaggcgcagtggtaggcgcctgtagtcccagctactcgggaggctgaggcaggagaatcgcttgaacctgggaggtggaggctgcagtgagccgagatcgtgccactgcactctagacagagcgagactccatctcaaaaaaaaaaaaaaaaaaagaaaggccaaggtggcaggatcacttgagcccaggagtttgagaccagtcggggcaacatagcaaaactctatctctacaaatacaaaaaaattagccaagaatggtggtgtgcatctctagttccagctgttcatgaggcagaggcaggaggattgcttgagcccaggggggtcaaggctacagtgaggcaagatcacgccactgcactccagcctgggcaacagagcaagacactgtctcaaaaaaaagacacggcctctacatcaccccaggcttgagcgcagtggtgccatcacagctcactgcagccctgaactcctgggcccaagagatcctcccgtctcagactcttgagtagctaggattacaggtgtgcaccaccaatgccagctaatttttcaattttttgtagcgacaacgtcttgctatgttgcccaggctagtctcaaactcctgggctcaagcaatcctccagcctcacctgccaaagcgctgggattacaggcaggacttgttttttggagtgataaaaaataatctaaattcaacaagatgataaacgctttgaataccctaaaagcgctgaatcgtaagcttcggtgggtgagtggtatgctgtgcaatttacatctcagtaaagctgctacaaaagagagaaaagagagaagcataagcagagctgagtctacccaacgggcagctgccagggcttggcagtgtggccctgggccatgcctcagggtcctcacagggacaggccccagcctgggtgagcccagagccatctctgctctgtaagcctgtgcgcctctgaggcagaagttggcattgggaaggacatgttgctcccagtggcctcggatatctgaggctcttgacaaacacccactctacactaggccctgtgctgggcaccaggacagagatggagacccaagctggagaaacacatggacatggggtcccccagagctaaaggggaggatgtgagggcgcttgaaagcaaggctgctggacggacacttagaaggacagcaaggggttcaatcaggcaggagacagggaaaaagctgccaggcccagcaatagcacaggccagggtgggcagggacggatgtggggccagcgcttggacaggcgatgaggagggcccctccctgcaaggcattatgtgccaagttcctgggtcatgaaaaaaacctttccagcactttcggaggccacagtgggagaatcacttgagtcaagtttctttccttttctcaaagggcatggatacacctggttctcaatgctctcttttctcaccaatttcttttctttctttttttttttttgagacagggtctcactgtgtcacccaggctggagtgcagtggtgtgatcatgactcactatagccttgacctcccggctcaagcaatcctcctacctgagcttcccaagtagctgggactacaggtgtgcaacaccacactcagctaagtttttacgtagagacggggtgttactatgttgcccaagctggtctcaaactcatgggctcaagtaatcctcccacctcgccctcccaaagtgctggaattacaggcgtgagccactgcgtccagccccaattcctcttttaaaagtggggaagtgggcatggggaaggaactctaaggggaatccgcaggggcatcggcagcactcacattctcatccttcgacgggtggatctgctcaatcagccgctggacgatcttctcctcgttgagccactgagggtgagaaggcgagggatgcatcgctgtccaccacgcccagccccccacccccagaggagccggccctgctcacattgacaacatcctgcctcagctgaggccgctccacacaggtgagcaggcgcagcaggaggtccatgatggccgaggtgccaatgtgctgcagcagcaggtccacgaagtcatccttcttccgaagaaaggacacgagctgggggcacacgggctgcgtcatgcacagggcctggcccagccaccacccctcaacccacggtggcgccagggtgggggccagggcacctggtctgtcttgcggttgatgaggatgcccatgaccttgctgaagaagctggccagcagtgggttgaggctgccggtgctctgcaggaagccgtagagccggttcagaagggactcatcagcacccagggcatcattgatctggggcacatctgaggtcagaatctcgcaggccacactggggtacctgggaggcaagcacaggcgggtgggggctcgggtcggaggccgggggcagggggcggcaaggctccaccctcttctctgcaccgggcactgggtttctgggaactgcagagacccctgtccaggaaggggaaagggcagaggacagggtgacgcagaaacaagggcccacaccaggcctcctccaccctgctaacacccaaccatcccatcctaggctccttaccacccccaagacaagctggtcctgaagctcctgcgcttcccaatcccccagcagctaacactcatcccttttgcctctcagcggcttcacttgcaaccccgtatgctgccccagctccggctgactcctggaaccttgctcaacttccaacctcacctcctgcctccctcctccaaactttcacacggtgcctgacggctccaagacaagagctgccccaccagcgtgccactcaaggccctgaggggccacagtctgctccaggactgtggggaggtaccccttgggaggctgaggcaggcatatcacttgaggtcagaagttcaagaccagcctgggcaacatggcgaaaccctgtctctaccaaaaatacaaaaattagctgggcgtgctggcttatagtcccagctacttaggagggtgaggcaggagaatcacttgaacttgggaggaggaggttgcagtgagccgatcatgcctctgcactccaacctggtgataaagtgagtctcaaaaaaaaaaaaaaaagtgtcttttcagcatcgcttggattaaaaaataagtaaagtgtcttcaatagcagacaagtgtttcacaaacatacaaaaaaagtttaataaaaagtaaataaaataaaaggcggcgaataaagagaaaaaccagccgggcatgtcgtcacatgcctgtggtcccagctactcgggcaactgaggcgggaggatcacctgggcccgtgaatttgtggctgccgtgacccgtgactgtgccactgccctccagagcacaggcttggtctgcacccggtgagctgtgaggccttgtgcaggagcctggctgctcccagcctcgtcttcctcatccccaaactggagtttactgacactgacgcatttcagggtagctgtgaggcttgcgtagtgaaggtatgtgtgatgctgatagggacgggctggccaggagctggggaactcacttgtagcgcagccgctcctcaccgctatctggcggctcctgggtgacccaggccaccattgcttgcaggtggggtggctgcagcaggaagtccagcagcttgcggttgacgaccttgcactcctgcagcacgtcttcctcgtccagcagctcgggcaggctcaggtcctcccgctccagcagcgtgtccaggtgcgagcttgtgtgcaggtcaaacttccaaaacatggcgccctgcaggcatagacacaaccagcgccgcgtcagacgccccagggagtccccactggacgaggcactgaccacaggggctgagtgcccaccttgggcacagcctctccccaagtcccagccctctgcctcatgctgagcccggccccgccccgggactgcccgcaggctcactgcctccatcactcaggcttaaggctcccagtgagcaccaggctcctgcagttgccctcgagcctgcccctcttcccccatctccagcctcccggccgcctcgcctgaggtccagggggtcatttcacacctgaggcctcaggcctggtgaagtccccaggtgtggaccatgtgcagggcctgcgagaagaggctggaccctgtgcactgaggggcctcgggccctgtctccccatgagggtctgggtccactatccctacttttgggagagacactgcagaggcagggccttaacctctggcttcaaatttgcttcaacctgtatttgctcaacaaactcagatgcccgatgacttccagcacacggctgctgcttggcccagcaaatcccccaaggctacgtgggaggcatggggcggcggcagggggaagagaggaagtctgtgcatctccaggctgtggccgttgcctggacaccactcacacacaaacacaccccaaccatcctctcacccagcacctgggctggaacaaggaagaggaaaagttggaagggaggggctcccagaatagtcactgaccaggacctgaaggaacccagggtgggatagacagattctgtgggggaagaacaaagctggcaacacccggccctgaccctgtccccatctggagctggctcccgccctctggaggacagtgcctggttcctcagcctggttccagcccctaaacgctcgtgcatgggaactcactggcaataaggaaacacacacagagtattaacaagatgccaggcaactccattctgagcccctgccctgtactacatcactgctccgcagagccctagaaagcctccacacagaccttccactacagacctgacctgtgacctgtgctctgggcacttgatgacaatggtcctggctctgcatgtgtgctgtgcacatgatgtccaagctcaccagcagcccccaagaaagctgtcatcactccgccacacaggacaaggggcaaccaaagcccggtaagtcaggcggcatcctggaatctcgaaggccatctggtcccagcagacagccttcacggagctctcaccagttaagacactgaccagagctcacgctcattacctgcctcctgacaaccgcatcaccagctaaggcagaggccactgctacccccaagtcactacagaggatgctgagaacagagcagagccggcacaagaggccaagggtgcctctcccgcaggccctcaccaccatcactcccaggcacagatgctagtccctctcctccaatgcccttctgcagcttcttccagttcagtcattccctctgcacaggcctccaccatctcctcgagccctgctgacctgtcacctcagtgcccaccagcccccaggcctgactcagccccaggccccagggaagagacagggagacgtggagcaccaggcccagggaagagacttcatcggagcttaggagagcagcctgggctgacaaaacgcaggacagagtcccacacatggcctcaggcaggtcgaacgcctcttgggcctcctttcctctccttcctggctagcttgaagccaggccagcctggggccaggatctccttgctcatccaccctgaccaccctaaggctgggctcagcacagaaggttgcagtccagaccttgctcccagtctgcccgtctgcctcggtaactctagattggcaacaatcttgatataacactatatgggtccctacacctggccaatgacagttgagggtggagcagagggaagagttccgtgaccaacgacagtcatggcggcagcaggaggactaggggagatagcagcagcctccaggcatttgaacccctgctcctctggggggcctgccaggtcccagtccacagcacccagtgactcaccacttacccctcaccagtccacttttcccaataatcctttgtttttgaggagtctcactctgttgcccaggctggaatgcagtggcacaatctaggttcacctcaaccttcacctcccgggttcaggcgattcttccgcctcaacctccctagtagctggtactacaagcatctgccaccacacccggctaatttttctattttggtagagatgggatttcaccacgttagccaggctggccttgaactcctaacctcaggtgatccgcccacctgggcctctcaaagtgttgggattacaggcatgagccaccatgcccagactcccaatattccttctaaggttgggtgtggtggctcacgcctataatcccagcactttgggaggcccaggcaggcagatcacccggggtcaggagtttgacaccagtctggccaacatgatgaaaccccgtgtctactaaaaatacaaaaattagccgggcatggtggtgtgtgcctatagtcccagctactcgggaggctgaggcaggagaactgcctgaacccgggagcggaggttgcagtgagtcgagattgcgccactgcactccagcctgggtggcagagcaacactctgtctcggaaaaaaaaaaaaatccttttaaagcacaaacatgagtacccgcacctgctcggtgatgtgcactccaccaagcctgcatccaggctctcgtgcccctgcccagccagctcactgactgacctccatgcccacggtgaccccagtgccctggggaggccgtgccccatgccacctcgccagtgctcctggggctgccacttcaggtgtctcctgcacagcccgtggctgcctgaggcacagtgctggatggatatccaggaggccctgcgggtctgggtggatgggggcattccaggcaatgatgtcgatggtatcagccactgcgctccagcacctgcactgcgctgactactctgaaaaggacttcacagccatcacctccaccaactctcacaaccaccctccagggaatggccttattttacaggagaggaaactgaggcacaccaaagtaaatgcctatgccccgatccaggggttggcgggcagtgaagctggcactctcagctttcagaagttgtattttcagggtgcagagcccttgtcccagcacagggcctgtgtagtggacacttaagggatgaatgagcgagttcccgctgagccggctccagcacttgctctgcctgagggactagccctggccacagtgaccccgactctcacctcagggaggagcctgccatttccaggcccaccctgaagggacctgtctggatggtaaactccctgtccaccttgtccccagctgctagtgcttactcaacagacatccctggattcaggatggagggctgtggtcctcaggaccctcccagcccagctgtgacagcacagttcggccagaggcctgagttctcctccaacccagcaccaccagaaatctagggacttatcaggcctcccaccccgacccaggcaccgctgacctccccaaacataaccatcccaccccttctgcctgcatgaccaccacttgacggcaggccccccacactcgaccgcaggcgacccctgctcgttccctctccccacagccatgcagagcttgctgaagggaaaatcagaaccgccctctcatcgggtcagcgcctgggaccctcaatgacctcccactccctacttgccctggccaagctggccttctgttttcagaacacactaagcttgggtctaccccagcgactttgtcctaataactcactttctcatcctcagatctcttactaagcattcacctcacagaagggccttccctggcctgcctggctcaagcagcccccagccccgcctttgtccaccactgtctccctgtctccctgagctgtgcgttctgacctgccgcctggaagcatctctgtgacacagcaatgaagcactggaggtacacactcgtggccctacaatgcttcctctagaaccttccccctaggttaccatgggcacctgagggcagcacctagcatggaacctggccctggcaataaacgctcacaagtattagctgaaaagcaaacctcattttcacaaggccccagctcctcccaggcaggaggctgccgtacctgtcagggcgttagacgaagtgaaatcactcccactccggcccctcccagccactcctacggggtccctaaatcaggaggtgggggaaagtgcaagatcgccctgggcaggcaatgggtgtgtattttcccctgtgtcaagagtgacgaaggcaccaccacctcacaaggaaatacaactgtttcccttccttgctccgggaacctctgtgtgcacagtggtaactccccacctccccacttctgcccagatgctagacctcctcaagggaccatcccctacttcccagcccgcttgacaaggaatgcgacaggccgaccaccaagtgtccatgtcacagatgagaaaactcaggctcagcaaaggtgactcaccagcgtgctgagggaagcgggagggggaatggatttcctgatctgggtgtacctgggaccagaataatctcaaggggcaaccgccaaatttatcatgactctgccaatttccggcctaaggctgtggcgagcaaagcaccgagacgtggcaagcacacacacacagcctctttctccgtgggagaccaagcaggctgataggctgcccatgccatgccagcaaagccagtcccaaggaaccacacactgcaggcctccaactatgtgaagcatccagaacaggcaaatccatagagacagaaaagagcttacaggcttccaggagctggcggggattgggcgaagttcctgaaaggaaagggtgattaaaaaaaagttccaaaatcaattgtggtgatgtttccacaacgttgtgaatacactaagaaccactgaattgtaccctttatttattattttttttcttgagacagagtctctctctgtcacccagcctggagtgcagtggcgcgatctcggctcaccgcaacctccagctcctgggttcaagcatatctcctgcctcagcctcccgagtagtggggactacaggtgcgcaccaccattcttggctgattttttttttttttttttttgagacagagtttcgctctgtcacccaggctggagtgcagcggcgcgatctcggctcactgcaatctccgcctcccggttttaagcaattctcccacctcagcctgagtacctgggattacaggagtgcgccaccacacccagctaatttttgtgtgtgtttttttagtaaagacggggtttcaccatattggccaggctggtctcgaactactgaccttgtgatccgcctgcctgggcctcccaaagcactgggattacaggcatgaatcaccacgcccggcctaatttttgcatttttttagtacagacggggtttcaccacgttggccaggctggtcttgaatgcctgacctcaagtgatctgcctgcctcggcctcccaaagtgctgggcttacaggcgtgagccactgcgcctggctgtacactctaaatggatgaactgtacagaatatctcaataaaaactgttgggggaaaaaaaaaaacctgcctcaggccatcggccatggcagggacagagccagggccaggctcaggccttgcactatgtcccagcgtccgcagagctgatgagatgccggccagcctggcagagctgaagctgccaaggctcagccctggggcactcacccaggttaccccttccccatccctcaccaccaacagctctaagctaagtgagcccctccacagtggggacgggataggagcagcaccaagccagcatctgtagaaaatccatggacccgcacttgcagagacacttgtctcggctccacatcaagaccaagtaaagaattcttattattccgacagagtctcatgtggaagaggggcccagaggggtggagccacatggctagcaagaggcttccagtgtgccctggtctctaaacaacaggcagaaattctcacactgaggcccaccgttcacttctaagatacctgattaaagggcacaggcatggccctcggcccccaaaccccctacccctggtacagactaaccatctgcttcggggaaaaggtcaggcttcccctccaaaccgagctccccagacaactggggcaggggcagccagaatgagacgggagggtgctcgctggtgcacggcatccaagaacttcggccctgagaacccaggcagcgccctgaactctccatctcaagtggctcctctgaaaatcagaatagactgaaaggctcaaatgcaattgagtggtcgacactctacagacctcaattatcaggctctaaacagaatgaagatgcaaatatggaagaacagaaaaaaagagaaaaaaactttcccccaccacaacctctgaatgcactatggcctgaagccctctcagtcccctctcccaacctaatgaagcctgctagaatccctgcgaatggagcaggagagtgggtttcactcgcactctcctggtgaacctgggcaggcgcttgatttctctgagtctcatttcctcatccgtgaaaaggagacacagcccaccagggcgggctgctgtgaaaaggcattgagctaaagcaggtggccgtgacacagcaggagctcagcaggtgcaagtctcttccggtccaaccctgaggccacgtccagatgctttctggcaggacaggtaggggaccggtcactaccccaaaggtgatggtgctaaacacagaggagcaggagaaagactctacccatttgcctaagtgactcaagtacttttcctcagaccattcggatactacggcaggcgccatgcaccccgccacccccattctttgcaacttttagcaacttcaagaaagcggaagtgactaccactagtttttagctaccgtttgaaaaccatgagtctggctgcaaacggaagaaggggaaattgtaaatgagaaaggaagccattaaaaacgaaaactacctctgccgctctccctccaccagctctgcactattgcctctggtttctgacttagctgtggtgttttagggccttcaacaccagccacccctcaagggcctgccagccccttccttcccctgcttggacaggcactaactgcggctcccacagagccatccccactgctgcacgtatccgcccaagcacagctctgccgccagggaaccggtgggcccatgcttcatctgtcaccccttcccaacctgcgctgacccacgagcacccagaaatggaggtcatgggcacagatgcctcagggggcctccagaaacagctgcctgagctgtcccaatgctcagcagaagctccaacgcctggccccctggccggtaccctaggaagggaaagagcctgctaccagcagcaggctggccagcacccagctccttaaagggcccagagtccggaggacagcaagaccatctccctctaatgtcccccaagcctctgtcagctctcagccaaatctgaaagggggctgggaacacccaattccagggatgcagtgacagtaatggcaaccccaccacctctgggcaggacctacggtgtgtgccggctgcagaatccggcatcacccacccagcaaggaggaaccagggacaccaatttgatagaaagggccactggggccagaggagaagggggagcggcccaaggcccaacaagatgatgagctagggctttcctgtggcttgggaaagccttggggagggtccccacttaaagagaaccctcagtgcctccccctctggccccagaagcacaccctcccaagggagctagcagccctggtccaaccccagaggatggaataactaggaaacagaagagtctagaaacactggccaaggactgggacggggacttgaacatccacattcaaatcgtctcctgaactggccacaggtttaaaggaaagaaaggaaaagaccaatgaacggatttgaaatagctctttggaaaaacagaaaggggcagagttagggttacagtgtgatccaaagtcagaaaagcttgcattcccatttgacctccccaaactgaaatctctgtggcctagaccaaggatctcaccccaccgagccccagtttccttatccgggaaatacctcacagatggggttactataaggcagcactctctggagaaggacccacaaaactggtgtgcaaagggaaaaccacggtttggcatggaaaggcaggtgagccccatcaagccgggtgccgagtgattcccactctggcaaggcccctcactctcaccaaagctctcaggcctctctcacctcatctcttgctacctcccgcgtgggcgtcacacctgactgccctcagccggggctgggctgctccctcctccttcccggagctcttcgagtctgactagctcctcctgggtccttcaggcccccacacagacaccacttcctccagggagcctcccccccgcatctgtgttagaggcctgctccacgccgcttccacagcatcccgcagtcaccctggaacagcatgtgagcctcggctctgtgacaggatgtacctgttcagtcatctgcctccccctgaaacatgccgacttcccaggatctagcataaggccaggcccaactaaagctacttgttgaattaatgaaaactgaagccagagaaaggtgttctgttaagagcactgggccacacatcccacaaaagaaaaaaaatgggcagggggaccagacaagcaggttctcctctaatggaaagaaacagtagatgaaccaacaaaagctaatggccacaaagatggtggtgactcgcaatacacaactcaccaactcacagctcatgagtcacaacagagcaaataagccacaacgacacaccataccccagcagtggagcaaagttctcctcctctgcgctgctaacatttgggctggacggttcttttcggtgttggggctgcccatgcactggaggacacttagcaacatccctagcctccacctccactcaccagatactggcagcattccccccagttgtaacaaccaaaaacatctccagatatcgccaatcgtcccccaggggacacaatcgcccccagttgagagccactgcaatggacattcccaaatcaaataataatcgaaagaacggccaggtgtggtggtccatgcctataatcccagctctctgggaggctaggtaggaggactgcttgaacccacgagtttgaaatcagcctgggcaccacagcagggcaccagagcaagacccagtctttacaaaaaatacaaacattagccaagcgtggtacaaaaacacaaaaattgagcaagcattgcaggacgtgcctgtagtcctagctacttaggaggctaaggtgggaaaatcacttgagtccaggagttcaaggctgggcaaacgagcaaaacccagtctcaaaatcatcaacatcaaaacagctactgattgcagagtgtcatgtgccttgcattctgccacaggcttctacaaaccctgcacttaatccctagatccaccctctgaggagagcagtctgctatccccacttacagacgaggaacaacttgtccaaggtctcgcttggcagaagccggactcggcctaggtctgtctggcaaaagatcctctaacaattagctggactgccttctcatgatcccaatcccagaactagagttaaaaaaaaaaaaaaaaaaaaagcataacattttcaacagcacaagcagctccaacagccatcccaccactagtaagcacacgtggccgggcgccgtgtctccatgtgtgttgtgcatgtatgtaaaccaagtcctcatcctgtgttatccaggcaatctcgagtccttgctgcatttgcagcgcacgctaacagttagaccctcgcccttgggctggatgaaatcccactgcagtttctctacaactgtgaacccagtaccgcacctgacagtctacgcagcttcctttcctgaaacatcttgcctttcaggcgggtgtctatggtcatgtctgtgtgtactacgagcgagcaagaaagaccccaaccagaggtcccattcgaggcctggataagcacgccgggcggaactactctgcccctcaccctcccaatacatctgcactcaggactccgaccttccttccttgacatatctgcacgtgctgctccttccccccccggaaggcccttcttcccactctccatctgtcacctcctactcatccttcctagacagaaaaagccgtccgtccagtcagtctcaccagtgcctcccgctctgtggccccctgcagctccctaagtcacctcgatcacgacacgcaggaattgtgactgtccggctctgcctttgtaccccctccagggaccggccccacctccagggcagggcctagggctgatgccccctcctcggtgcccagcgccaggctccctgcctgccctcagcaggcttcatctcactgaagcaggcccgagtggtggctgctccagagaagccccgctcccaggtccctcgcacaagaagccggaggcgggagagggtcggtcaaggtgaaaacaagccccgctcctccagtcctgagctccggggatctaaggaggctgcgccacggaagaggtggcggggcagagatcggggcgagagggaagggtgtaagcaggcaaagtccagggtaaccagggagaaagactcctggggggccggggaaccggccagagaggcaagagagcggagctgaggctcagggactggggagcgcagctgcagagagcgagtgggaaaaggccgagagcaagagactgagactagggtggcggcggagctgaggtgaagagattaagagactggggagggtcgagggggaagaaacggggtgccgtggagaggaaacccgaaggaaggagggaaaggatccgaagcagaaaagacccgcgggggtcccgagagggaaaagcctgaggggacgcggagaggggaagacgtgggcgcctggccctggagagagagggtcgggcgacgcgggccgctcacctgcgagggggggcggcggctcctcgcactcggggctcatcggggcgcccccccccgccccgccgccggcggctccggcccctgctgcggggcccggtgagtgggggcgggggcggcgtcggggactcgcgcaggcgccggggctcgcggggtccgcgcaggcgcccgcgggtcgtggggtcctcgcgcgccgggtcctgcagagttgagggggtcagcgccgggtggagttgccgacgggcggggggcgtcactagtccgcgtaggcacctccggggtccgcaggcgaggtgggcgtgcgggccgaggcgggttggcgagccgggtcgcgaggcccacgcaggcgcctcagccgggaagacgggggaagttgccccggtttccacagtccaaccgagcgccccacgggaggggaaggcgacctcctccgcggtccaaacgggccgcagagccgagcagcgaccgacggaagccgaggcctacttccttaaccaccccttccccaaagccgctcaatctccgggctctgcggccggcctcagggcctccgacgcccggctccctccgccactatcccacaatccccctagcgcaggacgacgcaggaggccccgccctcccgcggctgtgttggtgcgcaggtgcggggggcggggtgcacgcctgggcggtgcagtgcgcgtgcgcccgggcgctcccgacaccgcccactcttgaaccccgccgccgcagacgcgcttgcgcccgttggtgccaacggtctgccccggaataaacccagacagctcagtgagccgcagctgcgcaccggctccgttccaaggccccgtgaatattccgctccaggatttcccttcccactcgctccgtttggaaatccgttcgctgttctgtctcctctaatcatagtggagctttggctccagggtcgggctcttgcgaaatccagacctggttttcgctccagccaaagccaggcgccttcgttccgtccggctctcgcgcttagccgcctccgagcctcagaggccctcagtcgtttccgtctgctggcgatagtcccggccgggtcgctggtgttgccagttccgcccaaagcagcttctaatagcatcaactgaaagagacctcctagaccttgtgtctagattgatgaaggtccctctggctttgagcctcggtttccccaactttaatagctcccctctctacccatgttagaggcctactgtaaaaatcgtgtgggcgcgaggaacttttttgtttttgtttttgttttaagactccgaattggccgggcgcggtggcttacgcttgtaatcacaacactttaggaggcccgaggccggaggatggcatgagaccaggagttggagaccagcctgggcaacctagggagacccccgtctctacaaaagaaaatttaaaaaattagttgggcctggtggcccgcgcctgtggtctcagctattcgggaggctaaggcaggagaatcgcttgagccgaggctgcagtgagccggattgcaccactgcactccatcctaggagacagagcgagaacctgtctcaaaaacaaagggcccagcgtggtggctcacgcctgcctgtacttgagctcaggagttcaagaccccacgcctataatcccagcactttgggaggccgaggtgggcggattgcctgagctcaggagtttgagaccagcctgggcaacacagtgaaaccacgtgtctactaaaatacaaaaaatagccggacgtggcggtgtgcgcctgtaatcccagctactcaggaggctgaggcaggagaattacttgaacccgggaggtggatgttgcagtgagcccagatcaggccactgcactccagcctgggtgacagagcgagactccgtctcgagaaaaaaaaaaaaaaaaaaaaagagcaaattcacccctcctttgccctctttgttctattgagaccctcaatggattggataatgccagctcacactggggagggaagatctttattcagtctaccgattcaaatgctagtctcttccagaaataccctcatagacacacccataatgttttaccagctatctggacatcccttagcccagtcaacacctgaaatgaaccatcacagagaggcatttccttttctcttttttctatagagatgttttgtcttttacccagcatttggcttccttgttttctccacaatatgatggcatcattgccacactgttttaacacagaggtcaggaactgagggataaggatgtggctatagtccctacccttcaaatggaagctgggaagctgtgggggctttaatgactgaagtctggatttccacccagcagaactcacagatatacattgtgtttgcattagaattgaaacttttttttaagagacagggtctggctctgtcgaccaggctggagtgcatggcacgatcacagatcactgcagcctcgaactcctgggctcaagcaatcctctcgcctcagcctcccgagtagctgggactacaactggaacttttttcttgagacaggatctcagatcctgcagctacctctcaatttatcctggatttaggaagaggagtgataaaaaccaatccaaatagactcaaaaatcccagatccaccagaacaatccacacaaaaggaatgagtctgacatcaaattgtcctag[131 bp omitted]aaacctggtctctactacaaatacaaaaattagccgggcgcggtggcaggcgcctgtaatcccagctacttgggaggctgaggcaggagaatctcttgaactcggagggtggaggctgcagtgagccaagatcgggccactgcactccagcctgggcaacagagtgagactcccgtctcaaaagaaaaaaaaaagaaagaaaaagaaaaagaaagaggaggatcgctctggaattagtccagctgtgaatcctggctgtgaacttggtcaggggtcagcctcctctgagctcagcctcctctctggaaaaacaacagctttcaaagctcttgtctacaaatgacaaaatttcttgtagctaaacagaaaaggaatttattaaaggaattgaggcagcctccgacacccccacctcccgccccaatcccacgtctctgagaaagctacagaatccgcttggcgctttgcagtcaggaatgaagcccacacccagccacaggcctgctcctgagacacagtgcagcctccatcaacggcacctggctcagacactcccgccagaatctctgccagccctgtccagaagccaggtgtggctgctcctgcactagccagaagggaacctgggcaggggcccctccaccgccaactcttggcccgacgaccggcgggctctgattggtagaggagctagaccaccagcgggttctgattggtgtacaaaacagattcccagagagagttctgatttgtggagctaatgtcacatgattaccctacagcaaaggatgctgggaagggaaatggcggctaccctagggaaaatttagatgtctaacctgggaaattcctcaaacctagaattcaggtttgccaggtggccgaaaaaaggacagatgtcccacacactgttgctcaggaaagacagggaagagtaaatgacacaatggctctatagatgataaagagcaacacttttattattcttccagtggctccccaagtcccttaaacccgtgcccctcctcccgtcccccatgcaccctccaaaggagatgacaaaggcggcagtgaaggaggagaaggaggaagagaaacacctttattggaagagctgtgtggacaagagaacggggatgagagtgagagcatgggaggtggggtccaaggagctggtgcctttctcagcgccccttccagggactgcacagagacgggctggcacaccctgggtccaggcacctaggccctgcgatcccttgggagagggccttgtaggtggggagggaggcaagaggcctggggttcccacggagaagggggcaagaagccacctggtttcaccgatccatgctgtcgtccgctgggctggagaaacaggtctgtagcagcttttcacagaactccagctcctcctggattgggcaggggcagggagcaaggggcctgagtgcagaggccggaccctgcctccagcattcttggcacccagaggtgactcctcttctctcctggccaccacccactcccccccaccagaggttaggcttttttaatcactgctcagatccatgattcactgtcttcacactggtgtctgaactacttgaactagaacccggggtcccccagactcgtctcactccattggtctgcctcatatcagcactcttgggctctttctaactcccagatatggaccactgctcaaaactttctgcggatacaaaccccagaaaccatgaaagaaagcactgagaggttaaactacgtaatataaaaaatactcccatggcaaaaaaagaaaaagaaaacgaggttggagaaaaatatttgtgattcatagcacaaatggctaatatacttaactcttaaagagcttaaaaaagtcattcgcaaaaaccatcacccaataaatagataagtgggcaaaggatgagaacgaacagttcacaagaaagagaaaagatgccaaatttcactcatgggagaaatgtaaactggactggagtactacttttcaacaatcagtttgaaaaaaggtcaaatggttcatcgaggccactttgtcctgaccaagatttggggagttgggcaccctcatgactggagtgtcaatggttgaacttctatggagagcagcttggtgatagctaatgaaacggcccttaaccctttaaccttcacctttaacatacctgaccccagccatttcccttctagaaattgttctacagacatatgtaataacatatacaaaaggttattctttcagcagtgtttgtcatagcgagagtgtagaaacaacctgcatatccatgctacaaaaaagagcccatccgcactgtacagctgcaaaatgaaagagccacaggcgagacatgcaatgcccacaaagcaaggggcagaacagccatcacagcacggcaggcttattttgcataacatagagaaaaaggagaattcacatgcacctttgctcgtgtgtacctaatattttaagaaggacacctgagcaactgggtagccagaaggaggggcaggagagagacttttcactgtttaccctcctgcgggtcttgtattttcaaccatgtgactacggaacctattcacaaagcattagtaaaatctgttacaaatctaatttgaatgtttccacgggtgtatacataagtcaaaa[131 bp omitted]ctcagcctcctgggtagctgggattacaagcacctgccactatgcccagctaattttttgtatttttagtagagatggggtt[143 bp omitted]ctacacaggaatgaatctaatagaatataacgtcccaaggaggtgggtgcgtttgctaagctcggctttgctgaagcaccagcattgattcattcacttcaacaaattaatgcattacttaatcagttaactatttgaattttaattagttgtgatttagcatttgttacttatctagttatctaatgagttatttatttgccccttatctaattaaatatctgatgacttgttatttatcacttgttatttacccaaaataattggttattttttgccatttgttatttcttgtcaatttaatgaaatagttaaatcattaagacatttgagtgatattatattcaatttacatttacttaatgtaaaacaactgtattgggtaatttagataataattcaatgattgggcaacactttaagaatctccaagctcctgtctccttgctgtctctcctactctgacacagcacgggacgaatgctaggcatgaaataaacatctgctgaatggaagataagtgaaatgcacgagaacacgaatgaaagcctgaaccagcggacccaggagcccccaagggcaaggactggctggctctgcccctactagggtccccactaccacacttggtctaacctggggaattcctcaccccccaggcccctccccctcacacctggtcctcctcacaccctgtcccttccccaactcacctggtccttctggagccgctgtcccctcccccggcacacgatcctcctcgaaccccatcccctgcccctcacacctagtcctccttgcaccccgtcacctccccgtgtacctggtcctcctggagcccctgtcccctccccctggcacctgatcctcctcgaaccccatcccctccccacacacctagtcctcctggagcccttgtcccctcccccttgcacctggtcctccttgcaccccgtcccctccccatgtacctggtactcctcatgctgctgcagcagctgacagcggtggcggaggagctcctccaggcccagttccggctcccgacactcgcgcacaccctgcggaaagtctgtcaccaggctgtgagggacatgacagcggcccttaggacctccctctagaggcctcactgacccaaccctatcgcccgccccgtcccctggctcactcaggagcctggcaagtcgctgccccacaatgggcctccatttccccatctgcggaatggacctcacgctgcccctggcccagggtgggtgctgaggggctcagcacagggcctggtgcgtgtcaactctggtgtgctgttgagagctccagcatcatctgattagacactaatccactggtgggggcgtgtacagaagcctctctccctcctgcaaggcctctgtgccagccctactggtgaggaaactgaggctccctgactcctgctcctttctggccccacacccttcctctctacgggaaggtcccaactcctgagtccctacgggctgattcctgagccacccccaccttgagaggacggggcccccaccccaggccccgtcctctcaaggagccaaagtacctgcacagggctccaagcacgtgctcgtggaaggggctgtgctctgtccgcaccagggccaccagctgctggaccatccccatggagcacagggtccctggggggagggctgcaggggtcagaggggcagccccacccatctcctatgccctccccgggatgcctgttcctccccttctcccacacctgcacccaccccagggcgtctgctccccactcctgccctcactcaagggctgccacacctttgtgttcagggtggcccaccagcaggttctgcagcaggaatgctgatttgaccttgagcttctgcacctgctgctgcatggccctcatcaacacagagaagccgtccaggcggaggaactgcagcagcccagcctcctgctctcggaccagacctgggagagggggaaaggtcctgagcttgcagtcaccaccaccaccactgtcatcacaagcaccatcaccaacatcatcacaaccaccatcaccaacatcatcatcaccaccatcaccactatcttcaccaccatcacaatcatcatcatcaccattctcatcctcaccaccatcaccatcaccaccatcctcaccaccaccaccatcactatcaccatcaccaccaccaccatcaccaccaccatcatcaccatgacatcaccaacatcaccatcactatcaccatcactatcaccatcaccaccacatcaccatcaccgccatcatcatcactaccattaacaatataattatcgtcaatcatcgtcaccatcatcaccaccaaccactatcatcccttgccatgggcctgcatatgcaagcattatctttttttgaagtatgcttttgagatataattcacaatccacacagttcagccttttaaagatattcacagggttgtataaccatcaccactaactctaggaaattttcatcaccccccaaaggaaacctatgagcagtcattcccaatttcccttccctctggcccctgcaaccacagatatactttcttcctttatggatttacctgtcccagacatttaatataaatgtgtccataaaatacgtgaccttttgtgtctgactgctttcactcagcatgatgttttccaggttcattcatgtcgtaagtggtatcagcacttcattctttttcatggctgaataacattccattgtatggatataccatattttatccattcctccattgatggaagcatcatcttttttaatttttttattttatttatttacttatttatttcattttgagatggactctcgttctgttgcccaggctggagtgtgcagtggagcaatcttggctcactgtaacctccgctcgcaggttcaaactattcttcagcctcagccccccaagtagctgggattatagtaacctgccaccacacccggctaatttttgtatatatagtagagacagggtttcaccatgttggccaggttggtctcaagctcctgacctaaagtgatccacctgcctgggcctcccaaagtgctgggattacaggcatgagccattgcgcccggctgtgtcatctctctcttttttttttttttgagacagagtcttgctctatcatccaggctagagtgcagtggcaccattttggctcactgcaacctctgcttcccaggctcaagctattctcctgcctcagactcccgagtagctgggattacaggtatgcaccactacacccagctaatttttgtattttgagtagagacagggttttgccatgttggccaggctggtattgaactccagacctcataatccacctgcctcagcctcccaaggtgctgggattacaggcgtgagccaccgtccccagtccgcaacatcttttaatcctcacaattatcctggaagtgtgtgctttcagaattctattttacagatgaggaaactgaggcctaaagagccaggctacacagcatgcatgacctttatccagagggcaatgagaactctggaaggactcccagcaggatgagaactgacctttggagtgcacctccagtaaggtgccccctcctgggtaggctctaggcctgtgctggccaagaaggacagaagctgctagtagcttgtggccactaaacacctgatatgtggccagtgcaactaaggaaaagagttgttcatttcatttaagttccattcatttaaacttaaggtgaaaaactgaagcag[212 bp omitted]gaggcaggagaatcatttgaacccgggaggtggaggttgcagtgagccgagattgcgccattacactccagcctgagcaaaaagagcgaaactccatctcacacacacacaaaaagaaaaccaaaaaaagaaaaacacacacaacgttgttgctctggcgcactccacactacccctgaaaactcagcatgttgcgatgtgcttcatttgtaaaatgcacacactaggttttgaagacttagcatgacaaaaaatacagtgtctcattaatagtccatattaattacacattgaaattataatag[148 bp omitted]tcaacctaccgagtagccgagattacaggcatgccccaccatgcctggctaattttttggtatttttagtagagacagggtgtcaccatgttggccaggctggtcttgagctcctggcttcaagtgatccacctgtctcggcctcccaaaatgttgagattataggcatgagtcaccacgcccagccagatgttatttaattaaagaaagaaaaaagaacaggcatgcatggactggaaaacacaaagactcctctcattcaatctgtaagcaaggcctgtcagctctaccttcaaaatgtacccaggagagacctgtcccctttacgccagggtttctccacctgggcacggttggtatctggggccagatcattctgggttgggaggcccgtcctgtgcattgcaggatgttgagcagcatccctggcctctacccagtagatgccaatagtccctctctcccagctgcgacaactaaaaatgtctccagacatttgtctaaatgtcctgtggaggacacgattgtccctgtttgagaaccactgctccctaccacaaccttgatctcttgcctaggttatcaccataaccccccagctcaccgcccaccttccacccaccctcgccgcattcaccctcttctctgtgcagcagttgggggcagggatcacagtatggctgccgtcatttttggaaagaaagccaaagtcatcactgcagcccacacatctcccttaaaaaagttacgcttattcagcgctaaaaagaaatgagctatcaagccaagaaaagacatggaagaaccttaaaagcagattactaagccaaagaagccagtcggaaaaggctgcagattgcatggttccaagcatatgacattctggaaaaggcaaaactatggagacagtaaaaagctcaggggtgggatgactagcgggagcacagaggatttgtagggcagcgagattcctctgtagaatactacagtatggatccatgtcatgatacagttgtccaaacccatagtacatacagcatcaagagtgcgccccagtgtcaactatggactctgggtgacaatgaggtgtccatgtaggttcatcgattgtaataaatgtgccactctggtagactgtaacaaggaaccactttggagtggctccacagagggcgagcgagtccatcccctcctgtcctgggaagggcagtggcaccaccgcctcgggcagcaggagctgaggggacgtaccctgcaaatggctcccagcacggaactccagtaatggtactggacagccacacaatggcataccctgcagccaccaaaaaaaaggacagatgccactgaatggtatactttaacattttcatgtgaattttacccccgagcaaaaaaaagaatggcatccaagctcccagagctcttgccctgcatcgtgcacaactttcgctggggaagccgaccaccacgtggtgaggccgctcacgcagcccgagcttcctgccaactgccagcaaaactctgctagccccggggcgagccatggtggaagcccatctctagcaccccttcctcagagggggattgtgagggatcaatgaggtgcagcgcacagggcttagtgcaatgagaccttcagggaacgaggcccggctgacggctgaccacaacctcatgcaacctcatgcaacctcatgaagacgcaaagccagaagccgccctcctcagcaggggccactgctgcattcctcacccgcaggaaggggaaagataagctactgttgcttaagaaaaaaggacagaggcaggtcaaggtgcgccacagtcaggatggcctgtgccagccgtgcacatctgaggaaacgagattaatccgtgtgtctgtgtgcacacataccacacacgacacactccacataagcacacaccacacaccccgtatacacacaccacatccacacatcccacacacgccatgcacatccacacaccacacatacgcaccacacatacacacctcatatgcaccccacataccccacacatatacatacatccccccagcacacacatcccacacacatacacatgcaacacacacaccacacacacctccacatatataccacacaccacacaacccatgtacacgctacactaacacacgacacgccaaacaccccacatacacaccatacacaccctacacacgcgccacacacccactacacacacacatcacacacacaccacacacacccacatttgttcttacagatttattaaaatctctggaagcagaaacaggtataacagtggttttctctggaatggggaccaggtttggggacagggaccatttgctatgtactcttttgtacctggtgaacgatgtgactgtctcacagatttttaaaaatatgtaatgactttttttttttttagacagggtctcactctgtcacccaggctggagtgcagtggcacgatctcagctgactgcagcctctgcctcccaggctcagatgatcctccctcctcagcctcccaggtaggtgggaccaggtgtgaaccaccaagatgacctaaagacttcttttttaatgcaagctattagaagaaaactctgccagcccctctctaccctgctctggccctcgggacaccatgtccttctctctgccctttgtggccgagctgccccatgtctgtctgtccctgtcaccctagttttggctgtgactttccaagtgcccctttccttgcctcatcagaatgcttccttcttccggaatctcctcctacccaaaccctccctgttctcctcccagcctctgcatggctggggccaccatctgccaggaacacaacactgattccaggactcaggatacatgggggtgagggagagaaagagggtgttggacccccctcacagcccccatttcaatgaccagataggctgctggaattaaaaaatagccaacctcaggccaggcacagtggctcatgcctataatcccagcacttagggaggctgaggtgctcacctgaggtcgggggtttgagaccagactggccaacagggtgaaaccccgtctctctgtactaaaagtacaaaaaaaattagctgggcatggtggcatgtgcctgtaaacccaggtacttgggaggctgaggcaggggaatcccttgaacctgggaggtggaggttgcagtgagccgagattgcgccactgcactccagcctgggccacagagcgagactccgtctcaagaaacaaaaaaagaaaaaaaaaaaagccaacctcgaacagattaaatgtagagttacgatatgacccagcaactccactgctaggtatacacccaagagaacggaaaacaaatgtccataaaaacacctgcgcagctatgtccacaggagcacgagagcccagagatacaaggaaaccagggactgtcagcagacaggcggaggaagaggcagggcacggtggacccacgcaacaggacacattcagccgcgggaaggaacacagcactgccacccgccaccactcggggaccttgcagcatatgaaaggagccaggcagaaaaggcctcacggtgtgggattccgtttgtacaaatgtcccggagagggaaatccttagaggcagtaagtagattcatgttgcaggggctgcgggagaggacggacgccgagtgattgcttaacgggtacagaatttctgcttgggggagaggatgaagatgttctgaaattttggccgggcgcagtggctcacgcctgtaatcccaacactttgggaggctga[133 bp omitted]gaggcagaactgcttgaacctgggaggag[132 bp omitted]ataccaccccgaacgcgtctgatcacatctaaaattagagagtgatgatggctgcacagcactgaatacactaagaagtactacgttgtttttctggtttttgtgtttgttttcagacaggtcttgctctgtcacgcaggctggagatgcaatcatggctcactgcagcctcaacttcccaggctcaggcaatcccaccacttcagtctcctgagtagatggaggtacagtcacgcaccaccacgtccagctaattttttaatttttgtagagacaggggtttccctatgttgcccaggctggtctcaaactcctgggctcgagcaattctcccgcctcggcctcccaaagtgttaggattccagatgtgagccaccacgcctggccaagagtactaagttatacactttaaaaggatgaattgtatggcctatgaattacatctcaataaagctgttagagaaaataaaaggaaagagtccagttggggcgctagtatagcacatgcaggcaggcatccagcacatacgaagagctccaccaggctgggatcctggctctgtgtgtcctctccagaccccctggcccgatccctcccgtgtggaggagacacagtgggcccaacttcagcaggtgtgcataaggattcagcgagtcaacacctggcatggagaaactgccccacagatgttggtttttgtcccgtccctgtgcccgacctggtgcctgtgtcccaggcggcagtatttgggggagtcctggccagctctgccctatggagctgcagaaacctggccgtgtccctctgcccacacctcagtttcttcccctgtcaaatgaggatgcaaacggtccctacttcacaggccattaggataaaaagaatttgtggctggacatggtggatcacacctgtaacctcaacactttcagaggccaaggcgggaggatcccttgaggctaggagttcaagactagcctgggtagcaaagcaagtcttgtctctatataggttaaatgaaaaaaaaaagaagaagaagaattcatgtacagcaggggttctgaccaaggggctttctacatctaggggcatttgtgcgctggcaggtggggtgatagtgtctctccatggcctggaggccacccaccagatgctgctcaatgtcctgtagtgcacaggacggcccccgagagagtgaaccagcgccagtgtgaacagtgcccagctgaaaaactgctgtgtgcaaagcgctcacgctgagggccaggtggtctccccgggaagtggtcacatctgctgcctggctagcagggggtttggccgagtgcgccactcactctgcccgcagcactcagccgtgcaggggtccaacaagcatgggaacaaacgagggaaggagatgcctctccctctgccccagcagatcccgggggcccacccggcacccccccccaccgccagcacccctgtccccagccccacccggacactcacaggagatggcgaagagggccttgacgcgcaccgtgtcgcaggcgtcgcggtccagcagccgcagcagcttacgcagggcacccaggcccagcacctgctcctggatggctgccacgttctgactgcacgtgccgatgagctgtgccgcccgccaccgcagtcccgcagcccccgcctccaggtaccggcccaccagcaggtgcatgccagacagctggcagaagtctgtgccacagaggggagcagagagaggccagatgttagggactgaaccgtgccccccaaaatgcatgggttgatgttctgacccccagtaccttggaatgtgactgtttttggagatgggatctttaaagagatcattaaggtaaaatgaggtccttagggtgggccctaatgcaatctgactggcgtcctgataagaagaagagatgaggacacagacacccacagagggacaacatggagggaggacacaaaaaatgccttctgcaagccaaggagaggggggctcaggagaaaccagccctgcccacaccctgatctcaaacttctagcctccagagccgtgagaaaatacatttctgtttttaaagccagtagtctgtggtgcttggctaaggtggccctaagctgaccactacagctgctgaggccgggagagccaggccggctcccacagggacgcagctctctccaaacacccaaccagaggtccccccaaggctagtacaactcgattccatcagcatttggggcattagggccccaggctccagactactaaatgccaggactgatcctggtctttgtgacaatctgaatgtccccagggtcagcaaaccacagcccacctcctgtttttgtaaataaagtggtattggagagcgtggcagttcctaaaaaaatgaaatacagattccccgtgacccagcaattccgcaccaaggcacagacccaaaagaaccagaagtagggactcagatacttatatactcaagttcatggcagcatcattcataaatgacccaaatgtccttaaaggataaagggataaatataaactgctctagccatacaacggagtattactcagccataaaaaggaatgaagcagctgggcgtggtggctcaagcctataatcccagcactttgggaggccagggtgggcagatcacttgaggccaggagttcgagaccagcccaggtaacatagcaaaacagggtttttgctatgttatatactaaaaatacaaaaatgccaggcctggccaggtgcggtggctcatgactgtaatcccaacactttgggaggccaaggtgggtggatcacgaggtcaggaattcaagaccagcctggccaacatggtgaaacctcatctctactaaaaatacaaaaattagctgggcatggtggtgggcgcctataagcccagctactcagaagggcaaggcaggagaatcgtttgaacccgggaggcacaggttgcagtgagctgagatcgcgccattgcactctagcctgggcaacagggtgagactctgtctcagaaaaaaaaaaaaaaaaaatttgccaggcctgatgacatgcacctgtaatcccagctgtttgggaggctaaggtatgagaatcactgaaacccagcaggtggaagttgcagtgagctgagattgcaccactgcactccagcctgggagactgactcaaaaaaaaaaaaaaaaaaaaaaggaataaagctctgacacacgccacaacatgggcacgccgcctttagcacaatcagccagacacaaaaggtcacgttataatcatctatatgaaatgtccagaacaggcaaattcatacagccaaaacgctgattagtggttgccaggggaccgggggagggccggcctaatgggtgctgggtctcctttgcaggcaatggaaaagttctggaaatagaggtggtgttgcacaacattctgaattgactgtaagtggtataaacagtcatatgggaggatgttcccctcagcccaccttcatcagcactgtgcatcttcattaagacagagaagatacacatatatatttatatttatatacacagagagcgcacgaggccagggaggaagtggtatctttggctttcgttctcatttgattactaataaggtgtaaaattgctgctgctgtgatgattggacactcagcacagtgcttagcacacagcagctgctcaacagatatttcctgaacaagcaaaaaatgaatgaaagagcaaagtcgttaaaagccatcctgcggattggagcaggagttctctgcccggataagacggggagacactggggaaaggtaagctagagggtggcggctgcactgcaggtcttctcggggtgctgcatgcgctcacagaggagggcttcccaaactccgtccagcccctgtccaaaatgaagacacctgactcccaggcctgacacgttacgtttactctgtgcctggtgttgtgcgggcctgggggtttctctcggcccagcctgcgtacaagaggaagtaatcaggacctgcccaaaccagactgccatgtagcagcacagcctgaactatgaaccaaggaagtgacaccccaaatccacaccctcaattgctacaccacccaacccctccaaatggaagtgagctctcctcaaaccttctgtgagctctgctgcttggagtaaaacagcatttacctccccatctgcgaggcccaccccagcgctgtttcctgcgcctggcccctcactcactctactctgcctcaagggcctggctgctgttcctgaacacaccaggcacactctggcctcagggcctttgcactggctgttcctactgtctggaatgcttttcccagagatcatcccacaactctcacctcacttcaggtctctgatcaaacgtcaccccggggaggccttctctgccaccccacccatgccactttccctcttgtactctggggagtggcagtggacacccagaggactaggagagaaacagccatctcagagctgatcagggaagtgggggactccacctgccatgagggtgaggcagagccttgctccttatggcaatggaggcgaacaggctgatggtgagaaggcagcagggaggctgacggtgtgagccccaagagtaggggcaagagctgagaggcagcaggacatgtacagaggggcagaacgtcctggcgggggaagcggggtacctgcggcattgtccatgttctcacacaggtcggccagcagctccagggccccctctcgctcttgctggtcggccgcctgctcggcctccccagcagtggggggcatgggctgtgacagcactcggaggcagctcttcatctgctccacctcctcccgctggcctcggaaggcagccgacatggcctcctgcagccactgacgcctctggagaccaaggcgaggaggaaagaaggagatccatcagtcattcattacaaaggaacagccattaataaagacagccaacaactgag[212 bp omitted]gcagcaaagggaatcgcttgaacctgagagacagaggttgcagtgagccaagatcaggccactgcactccagcctgggcaacacagtgagactatctcaaagaaaaaggagatgagagctaatacgtgactgctggaatttttgggggtgagggaggggagcagaggtctccttagtcacagttctaagtaaatttgagtgagctatttaatgtttctgtgcctgtttcatgcctcactgttgtaaaggttcaatgatatcatatatgtaagtgggttagcataatgctctgtatacagtaattgtcgattaaacattatatataatagctatcgctatgaatctgcaaaacaactctatgaggtatatatcattgttatccccacttcgcagatgagaaagttgagtcacagaaaggttgagacttacccaaggtcacacagtcagcaattggcaaagcctgaaatcaaacccaagcagtctaggctgggcgtgctggctcacatctgtaatctcagcactttgggaggccgaggcaggtggatcacttgacgccaggagttcgagaccagcctggccaatgtagtgaaaccccttctctactaaaaatacgaaaattagccaggcatggtggcccatgcctctaatcccagctactggggacgctgaggcatgagaattgcttgaaccgggaagtcagaggttgcagtgagccaagactgcgcctctgcactccagccgagactgtgtcctccacccccaaccctgcccccaccaaaaaaaaaaaaaaaaaacagcagtctgactacagagcctgtgctcttcatgaaaacacactgctgccttcagaagcactgtctgtatgctgggcactgtgtgcagccctacttaaagtagaacctcagaactaccctatacggtagttattattattatcaatttgtaaatgaagaacttgagattcagaaagatgaagtaatatacccaaggtcacacagctggaaatgctgaatccaggttagtctggctctggagaggatatgtcccctcagactctcttgagatctgaccttcagtcaacgataaccccatctagcacaatttatagcccacaatgcctccacacctggttttctgcctcccacccaagaagaccctagtcttcttgtggctccccaagtcacacttcccaaggcaactctatctgtccccaggcccctcaccccagcttcttgggtccccatcctttacctcctcactcatcggttctggaggagggtctggctcttcagagcccgcggtgatggccatctgcagcaagccttggaggttgcgtgggggccgggaattgcccgagcccccagccgaggagccgccgccgccgccccctgaagagcaaccctgggaggccgggggcagcgccaggggcaggcggctcccccttgagccttcgtctgacatgggccgtttgtgaagaagggaagaatgtgttagagggagaaggtggtcaccgctgaagcagctctggcgtcctgatgggtcgattcttgagggtctgctgagaaggcggcgtttcaggggagctcggcgaccccccatgaccccaaaccactctgcccccagcccacttaaccacagccccttttccttccttcatacccacaggacccttccccaaagtcataagcctctcctttctccctagcaacaggccccacccactctccctggcaacaaccccccttccccatctccactgcgtgcgtcccgtctcttagcaacctcactgctccgcctccgtagcaacaagcccgccctttggtctccttagcaacaagtcttctccctcctctccgaagaggggcgccggaataaggcggatctcacctccccgggtcctcaagccgccgctgctcctacagacaaagtcgtccgcacctgactctgctgggcgccgccatcttaaccggaaatacgcacggtttcacccggaagtgccaggcgtacccacccaacttcgtgccgtggttgcggctgaagctgcttgcccgactcttatccccttctcacctggcgggatactgcactcggccccgcccctcccatccgggccccgcctccaagctgggacgccccttcgtgcgggcgccgccccttcacgctcaagtagctggtcaaagccctgcccctggcccagttttcgcacctcagcgagtcccgcccccgatacttttgcaagctccacccctcttctaacgtgtgccccgcccccaggtctgaccccgcccaccctacgattcccgcccctgctctaggcctttcagactctcccagttgggccccggcccctttacaggcccctcccactcattgctgtcagtcatccttagaaggtttgggacctcgccccaactaatctgactttcgcctccaccggggccaccaaccccatctacaggagccctggggtcgcaaccgtaatggctggcctgtgagccttatgccccccgcaacccctctctcggcctcagtttctccatctgtcaagtggagctgcggcgtggatccctctcatcacccagcctctccctcatggactcttccccatgtcctgccaggtggagaggagaggattcttgaggcctagagccggaaagcaaagtgccccagagcccagcaagattcagagcgccagaggagccagcttggtggggaggcccgaggcctctgtgctccagaagtggggtttaggcctgggcacgtgctggtgcgggccgatctgcagaggtgttggccctgggctgggcttaaagaaactcccgtgttgatcctggataggaggcgttttcctccaggaaaaggttgtgctcaacgcaaaacgggcacacagtcacaaacgtatcaatcacctgctgggcgtggttgtgcagggggatattttgggcagaaacaggaagaccaaacagataggttgtgtgtgtatgtgtgtgtgtgtgtgtgtgtgtgtgtgtgtgtggtgtttctagcactgtgctgtgagatgcatctgggcctgtggatgtgctattatattagtttcctattgctgctgttaacaaattactaagaatgtggtggcttaaaacagcacacatttattatcttgcagttatggagggcagaaatccaaaatgggtttcacggggctgaaatcaaactgtcagcaggattgcatcacttctggaggctctcggggagaatgtttttcttgccttttccagcttctagaggccacactctttctttgacaggtggccccatcaccccaagttctgcttccaccttcccatctccatcactgactgctcctcctgcctccttctcacaaatactcttgtgattccatcgagctcacccaaataactgggataatctccctatctcagtcacatgggcaaagtcccttcagccatgcaaggtaacttatgcacagatcctgggaattaggacacggacatctatgtacaagtctatcagtttataatacatggccgggggcagtggctcaggtctataatctcagtactttgggaggccaaggtgggaggatcacttgaacccaagagctcgagaccagcctgggcaacatagtgtgtccccagccctacaaaaaaatacaagaattagccatgtgtgatggcatctgcttatatcacagctaggcaggaggctgaggcaggaggatcacttgagcccaggaggtcgaggctgcagggaactatgactgccctactgcaccccagcctaggcaacagggggaagaccctgtctcaaaaaacaaaacaaaacaaaaaaaagagggtgatcatataatttttcatctatagcaagacatttgagagcaaaaagggactcaatagttacagaaccaggccaggtgtggtagctcacgcctgtaatcccagcactttgggaagctgaggtgggcaaatcacaaggtcaggagtttgagaccagcctgaccaacatggtgaaaccccatctctactaaaaatacaaaaattagccaggcatggtggcgggtgcctataatcccagctactcgggaggctgaggcaggagaatcgcttgaacccaggatgtggaggttgtagtgagctgagattgtgccactgcactccagcctgggagacagagcaagattccgtctcaaaaaaaaaaaaaaaaaaaaaaaaaaaaaaaaaaaaaggctacagaaccagcctggctaacagggtgaaactccatctctactaaaaatacaaaaaaagccggacgcctaaaattgtaccctgctcaacaggcccctcttaacccccttccctgctgtagtcacctcctcagcacggacatgattatctaacacaccatacattttgcctattgaccttgctgatcatctgtttcatccaccagcatggaagctccacaggacaggcctttttgctgatttaggtcactgccacgttcttaccaacaggaacagtgcctggctgagatttggcactcattaaagatgtgtggactcaaggtgttgaatgggggactgggaaatctcacaggagccaataggctcctgtgtgcactttattttattttatttttgttagagacagggcctcactctgttgctcaggctggagtgcagtggtgcaaacgtagctcactgcagcctagaactcactgactcaagcctcagcctcccaagtagctgggactacaggcacatgccaccatgcccggctaatttttaaaaaaatttttgtagggatggggtctcactgtgttgcccaggctgatcttcccacctctgtctcccaaagtattgggattacaggcatgagccaccttgcccagccctgggtgtgctttacaggggacttgagaattaaatgggtgtctaacacttgcgggtacatgacatagagggatctatggtttatgcggaaagctaatgggggcaggcgggttactcacaggcagagcacatgcttgtggacctgctacagtggggatgtatgggctgtactggggtccacatgaagatataaaggaccctatgacgagcacagagaatatatgggggtctaaaaacataacacagggaaactgagggggttctggaagcttctctgtaaagagaatccaaaatcactctgggctgtgggtagatatggggccttgacattggtggggacacagacttacccttaccctgaatgggtggccttagggggctggggaaacagacatgaattttgggtcagcaactccaagaattctttcccctctctgtctctgtctccctccatatgtccccacctctccccagcacgtgtccctccacctgtgtgtacccccggccctctctacagctccatctgcgccccctctcccccacctctctggttggtcttcctctctctgtctctctgaatctctgactctctccatccctctgtcggcttccagcagctttctctccctctccctgtctgttttcccggcttgccattccttccttctcttctgtccctgtccatctctgcccttcctccctctctgcctcagcctgtctctggtggtctccatccctctggcgtctctgcctgtctcccgtctctgtgtcagccagcatctctctttgtgtatctccatctctgccccatctgttgggtcctctctctctctctccatccttccctccatcctctctcctgcatcctcccacctcctctccatccctccagctggaggcccgccccctgccccccctcgctccccctcccccctccgaaagggttaactttggggaagggcccggagtccccggatggtgatgtcagcgtgccggagagaaaggacgaggtggcggggggaggcggagaggaggaggaggcggaggagagagggcgcgtgggggggcgggggggacctcggcctgcagcatccgccggcccgcacctcagacccccccggcggggggaggcgcaggaagcggggggccggccagaaacgggctggggagggggggccccgcagcccccctgggccatgctgactcccggggcctgacccccccgggccagccccccctcccccagctccgcggcccgccgactggggggggccagcccagccccctggggacccccggagaggtggggggcagccgggggggccgggacggagcggtcgccggcccccaccggagagacggggcgacggccgcagggggggcggccgggggaccggtcgggccgggaccaagggcaccatgtcgtccggggccaaggagggaggtgggggctctcccgcctaccacctcccccacccccacccccacccaccccagcacgcccaatatgtgggcccctatcggctggagaagacgctgggcaaaggacagacaggtgagcctagcagaaggggacacctggggcggggggcagggtggaggtggcggcagaggcgggactcagggtattcaaatggcaggggctggctgcccagacccctgggcccctcatagagaagggacttgggattcagactcctgggtccctggatggagggggtggggggcgcagactcaggtcctggaggagaggggctgggggcctggactcctgggtctgagggaggaggggctgggcactggactcctaggtctgagggaggagggcctgggggcctggactcctgggtttcagggaggagggcctgggggtctggactcctgggtttcagggaggaggggctgtgcttggactccggagtctgagggaggagaggctggtggcctgcactcctgggtctgaaggagaagggcttgggggcctggactccagggtctgagggaggaggggctgggggtctggacttctgggtctgagggaggaggggactggggtcctggacttttgggtttgagggaggagggactgcggtcctggactttcaggtctgagggaggagggcctgggggcctggactcctgagtatgaaggaagagggtctggggtctggactcctgggtctgagggaggaggggcaggggtgctgaactcctgggtctgaaggaggaggggctgggggcctggactcctgagtctgagggaggagggcggtcggaaccttgagtgttgggacagggagtttggggccccagtgctccagtccccataggggcagaggctggaggggctccagggccagggaggggatggaggcggcctgcagagtggggccgggctgggacctgaggttcttgctgcagtacagctgcagaccggggtgcagtgcatccatcctgggaaacctcttccctccccactgtcctctggcctccagttctccaggcagcaggttggggtgacaggggccgtggggcctaagacattctccccttctctggcatgctggctcagagtgggaaacaggatggagggtgggaaggtgggctgcagcaggcgcgtctcctggagcggctgtggaaagggcgttcatcctctgctgttgctgaacgctggccaccggccgcggcctccttcctgccggatggatggtgggtggaggtgacatgggagctgaacgcccagagtctctatgaagctcagggccagagctggcaggagtggggaccgactgggccgtaactgggagctgagaccctagggaaaaggagagggtcaaagtcccagatcctgagtggtaagagtgtgaaggtgttgctgacctgaattcctgagttacaggagaagaaggggtcagacctggactgggtctgagggaggaggggctgggcctggagtgctgggtctgagggaggaggaactgggggtctggagtgctgagtctaagggaggaggggctgggggtctggagtgctgggtctgagggaggaggggctgggggcctggagtgctgggtctgagggaggaggggctgggggcctggagtgctgggtctgagggaggaaggggctgggggggctggattcctgggtctgagggaggaggggctggggtctggactcctgggtctgagggaggatggaatgggggcctggactcctgggtctgagggaggaggggctgggggtctggacgcctgggcctgcagctttaggggctagtcagggctaggtctgtggctttgggggctcaggtcctggagtcgagggtcctgaggagaggtgtgggctaggagaccggacatacccttggtgtctgtgtgctgtctgttagggctgccatgaagagaagacccaggaaggcagttgaggctgggggttcaggagaaggtggagggtgatctggggaggggcaaatgtgagattatattcactgggaggggattcaggaggaggtggagggtggtctggggagggggcaaatgtgagactatattcgttgggagtcatagggtctccaaaagattgaaaagcagagaatacaaggaattgatggagagagacagagaaagtgggggggcgggggcttggaggagacagactcggggagacacggtgaggaaagaatgcgtggcaggcgggctccccaggacggagagggtgagggccagggggtggctggcagaggagaggggcacctggctggatggacagtcaggaggaacggactggcaggagggaggggaagggtggttttgtgggagtgtgggctctcagccccaggagttcaggtctgatgtgttcaggccattgttaaacagccagcccaggaggaaggagcaaacagggtggccaaggggggacataggcgctggggacgaaggggacccggcggaacaccccacattttcaccctgctcctgcagggctggttaaactcggggtccactgcatcacgggtcagaaggtcgccatcaagatcgtgaaccgggagaagctgtcggagtcggtgctgatgaaggtgtgtgcgcctgctgcagtgtgcctgcgggtgggggggcctccggggctgagggcaggggcggggccgtgctgacctcttttcccgtgtccccacccctcttgaccctcaggtggagcgggagatcgccatcctgaagctcatcgaacacccacatgtcctcaagctccacgacgtctacgagaacaagaaatatttgtaggtatttatagacacccagccctaccccatcctccctctccaggttaccagggtgggacttctccagaaacagggcctagggggacctgggggacctgcagctctccaggctggaccgctgaaggcccagttccttgcctgttgcacagggaagcccctgacacacagggaaccccactgttgtcacgctgtgttgggcctgaggccaagggcaaccatcctcctaccgtgtccccagctccagctcctcgccctgtggcactgcatggaatgcgctctgctagacaagcagggtgccctcgaccagacccaatctgctatgggcagatgcctcctgtttgtaaggcaaggggcctagcaaagcccaaaggatcttcccaaaccccaactctggagcactggagagcccccctcctcccccggcataacttcgggtgccgtggctggacaccccaacaatgggccgccttaggaggtctgagtcactatctcaaagtcaatcacccgccaggaaggatgggggtgggggtccagctgtccagactccagagaatgggcctctttgtccaaactctggtgacccaaaggacagctgggctgggaagccggagaggggacagccctcgtgttcccccccggcacccagtcccccggatgaactgacatcaggtccgtcgatgctggcgcaggtttcaccacacgggaagctgtctgcccggcgctcatgggacctgctctcaggctttcccaggtgtggtggtagggaggggctattgtccggaccggtgcatggtcgctcccactccactcttggcgtagggaggcagggccatgggagtttatgcttcgggcaggaatcccagccatctaagagctcatagaaattgagcttttggggccaggcgcggtggctcatgcctgtaatctcaacactttgggaggccaagatgggcggatttcttgaagagctcgagaccagcctgagcaacatggcaaaaccccgtctctacaaaaaatacaaaaattagctgagtgtggtggtacacctgtagtcctacctacttgggaggctgaggtgggagaattgcttgaacctgggaggcagaggc[131 bp omitted]ccgtgtcccagaggcttatgggaagggagtttgggggtttttttgttgttttgtttttttgagacagagttttgctcttgttgcccaggctggagtgcaatggctcgatctcggctcaccacaacctccacctcctgggttcaagtgattctcctgcgtc[133 bp omitted]cggcctcccaaagtgctgggattacaggcataagccaccgtgtctggccagaagtgggggtttttaacttctaggcgctgatgggagttgtcgtctattgcctcacagaagctggcttggactggtgcaaccttgcaatcgttaatactcgaaaatgaattcaaatttgagtttcctcactccagagggaattagaggcttggctttctaggggctaataggagtaggggtatcttcacttcccagggtcctataagaattggggtctttgaccttcaggtgctaatagagtcgccttatctcctgaaaccattatgagtcaaagtgttggttcccctctgaagctgacatgggaggctctactgcccagggctaatgggacttgagtttggtttcctagaggctggtggaaactggagtcacttcctcccagggagtgatgggaactggaatctcttcctcccaggaattaatggaaactggagtctcttcctcccagggacccatgggaattggagtctctttctcccaaggatcatgggaattggagttctctgccaccaggagccagtggaagtgggagaccaggccctttggtcctccacatgccccttccagccctctgccccctctatatcctttaggtacctggttctggagcacgtctcggggggtgagctattcgactacctggtaaagaaggggagactgacgcccaaggaggcccgaaagttcttccgccagattgtgtctgcgctggacttctgccacagctactccatctggtgagtgggcagcttgagggggaggaggggctgagggctgcccagcagacaggcccttgggggcatgtggagggctgagcaaaagccatgtggtcggcccccaaacctttatcccattgagacataactcatacaccagaaaattcctccttttagagtgtgtaattcagtggtttttgatatatttgcagtggtatacatctgccactgtggaattttagaacattttctcaccctgtacccattaagtaagcagtcactccccattcccctcctgcccccagcccccggcaacctatgttctgtctgtatggatttacctattctagacgttttatataaatggaatcatacgatacatggccctttttgtattgttttgttttgtttttgagatggagttttgctcttgttgcccagcaggagtgcaatggtgtgatcttggctcactacaacctctgcctcccaggttcaattgattctcctgcctcagcctccggagtagctgggattacaggtgcacaccactacacctggctaattttgtatttttttagtaaagtcggggtttcaccatgttggccaggctggtctcgaactcttgacctcaggtgatctgcccgcctaggcctcctaaagtgctaggattacaggcgtgagccaccactcccggcctctttgcccatctttaattcagttattttttaaaatttgatttagtctttttattattgatttgtaacaattttttattctaggaacaagagattactctaggaacaaaattattcctaaaaattattctgtatgatgacagcaagaacaagggggaaaatttaacaaagaaaaaaagaattgtttattctagatgcaagtctttcatcagtatacatttttaaattattttctccaagtctgtgccatgtttttacatttttataagtcttgtgaaaagcaaaagatttttcattttgataaattccagtttgttgatttttttattttacacctcatgctttttctttttctttttttttttgagacggagtcttgctctgtcacccaggctggagtgcagtggcgcgatctcggctcactgcaagctccgcctcccgggttcacgccattctcctgcctcagcctcccaagtagctgggactacaggcgcccgccaccacgcccggctaattttttgtatttttagtagacacgggg[135 bp omitted]gaaacttttgcccaactcaaggtcactaaggtcttctgtatattttctagaagttgtatagttatagctcttgcatttaggtctggcatccatttcaagttaatttttgtatatggtgtgaagtaagggttgagtaagggttatttatttattcatttatttttagtttagtttagttattgagacagggtcttgctatgttgcccaggcttgtctcaaactcctgggctcaaggcatgagccactgcgcctggcctatgtgtccacttttaaagattttttttttggctgggcatggtagcacatgcctgtaatcccagcactttgggaggccaaggcgggcagatcacctgagctcaggagttcgagaccagcctgggcaacaaagtgagattccccccatctctccaaaaaataaaaataattagctggatgtggtggcgtgtgcccgtggtcccagctacttgggaagctgtggtaggaggattgcttgagcccaggaggttgaggctgcagtgaggcaacagagtgagaccctgtctcaaaaaaaagaaaagttattatttttttcattgaattgactttagcctccaaatcagatattaaatgtgcaacgtttttctaactgttcaggtacaaaatgaatgccttcatcttttagcctccttcatttgcgcatctctctcactaagatgtgtttttggagatggggtggggatcacggtagagggactcagactttgggtaaagcttgatgataaaaaggccacctacttaaattttcggtttttgtctttttttattttttgagacggagtctcgctgtcacccatcctggagtgcaatggcacgatctcagctcactgcaacctccacctcccaggttcgagcgattctcctgtctcaaccttccgagtacctgggactacaggcacccgccaccatgcccggctaattttttgtatttttagtagagatggggtttcaccatgttggccaggctggtctcgaactcctgacctcaggtgatccacccacctcggcctcctgaagtactgggatgacaggcttgagccaccgcacccggccctgtttaaattttccacaccttcctgttgacaagattgtcaaaaccctgatattgaaaccctggcctctagggggagatattcaacgtatttaacaagtttgacccagttaatgaccaggccaaatgaaaactgcagaatcctacactccctctctccccagacaccaacccttaaaccttgaggagtttggttcaagggtgggaaggtcccaagacaggaaccaaggattttaagaaccagctgcatatcagctttacctcaaaatagctcactttgtacatattcaaatacttacagataaactaatatgacatctgggatgtcctacaaactaatttgggttggggaggagtatgtaagggacagagatgagatcagattggccctaagatgatcatggatgaagctgggcgatgggtaagtgaggcttcctcttactttctctccagttttgggcacgtttgtgattgtctattataaaaagtttccaggccgggcgcggtggctcacgcctgtaatcccagcattttgggaggccgaggcaggtggattacctgacgtgaagagttcgagaccagcctggccaacatggtgaaaccctgtctctactgaaaatacaaaaattagctgggcgtggtggcacatgcctataatcccagctactcgggaggctgaggcaggagaattgcttgagcccaggagacggaggttgcagtgagccgtaatcgtgccactgcactgcagcctggtcgacagagtgagactctgtctcaaaaaaaaaaaaaaggaaagtttccaaagccagacatggtgatgcacgcctgtggctccagctactcaagaggctaaggccagaggatcacttgagctggggaggtcaaggctgcagtgagctatgactgtggtactgcactccaggccgggcaacagaaagggaccccatctctaagcatacacttgatcttagccaaaaggccgagaagcaatgcccatctctaaaaataaaaaacaaaataggccgggcgcggtggctcacccctgtaattccagcactttgggaggccaaggcaggcggatcacctgaggtcaggagttcaagaccagcctggccaacatggtgaaactctgtctctactaaaaatacaaaaattaggcctggcgcggtggctcatgcctgtaatcccaggacttcttgaacccgggaggttgtggtgagccgagatcacgccattgcactccagcctaggcaacagagcgagacttcgtctcaaaaaaaataaaaatacaaaaattagctgggtgtggtggcacatgcctgcaatcccagctactcaggaggctgaaacaggagaatcacttgaactcaggatgcggaggttgcagtgagccgagatcatgccactgcactccagcctgggtgatagaatgagactccatctcaataaataaataaataaataaataaataaggctgggtgctgtggttcacacctgtaatcccagcactttgagaggccaa[131 bp omitted]aggcaggagaatcacttggacccaggagacagaggttgcagtgagccgagatcatgccactgcactccagcctgggagacagagcgagattccatctcaaaaataataataataaatacatacatacatatgataaaaaattaaaaatttttaaaaagaccaaaattaatgaatgataataaatggtctctcatcccctaaaaatccaaaaagtatgcagaagtgttccactgtgagagccagtcagtggggcctgggcctcctgggaggaaggaagaggcctgagtcccacctggctgtctcagccacagagacctaaagcccgagaacctgcttttggatgagaaaaacaacatccgcattgcagacttcggcatggcgtccctgcaggtgggggacagcctcctggagaccagctgcgggtgagtggggactgggctcccgagaccctgggcaggggtttagaagctggctggaggctcacatcagctctctccctcaggtccccccattatgcgtgtccagaggtgattaaggtgagtgaggggcggatagaggggagaggggtggaggcagcagtgaggagcgatgaagtcacaactggccttcccttccagggggaaaaatatgatggccgccgggcagacatgtggagctgtggagtcatcctcttcgccctgctcgtggtaaggcgccctcacctctcctgtcatttctagatcaatcccacctggtgggagcataggacagtaccttccatcctcaggtcatctcctgaatttatttatgaattttatttatttattttgagacagagtcttgccccgtcgcctaggctggagtgcagtggtgtgatctcagctcactgcaacctctgcctcccagcttcaagcaattctcctgcctcagcctcccaagtagctgggattgcaggcgcccaccaccacttccagataatttttgaatttttagtagagacagggtttcgccatattggccaggctggtctccaactcctgacctcaggtgatccacctgcctctgcctcccaaagtgctgggattccaggtgtgagccactgaacccggcctatttatttatgtattttgagacagagtcttgctctgttgcccaggctggagtgcagtggtgcagtcttggctcactgcaacctacgccgcccgggttcaagctattctcctgcctcagcttcccgattagctgggactacaggtacctgccaccatgcttggctaatttttgtatctttagtagagacggggtttcaccatgttggccaggttggtttcgaactcctggcctcaagtgatccaccctcctcggcctcccagaatgctgggattacaagtatgagccatcgtgcccggcagct[131 bp omitted]cctcagcctcccgagcagctgggattataggctcttgccaacacgcccagctaatttttgtatttttcacagagacagggtttcgccttgtttccctggtcggtctcaaactcctgggctcaagtgatctgcccacctcagtctcccaaagtgttgggattacatgcgtgaggccaccgaacccagcccatctctcgaatatttcactggtaatgggaaagatactacattaaccaacagaccaagatcctggagttcccccactctgtggggagctaaccttttcattcacagaactgtgggttaaaaagataaaagaactatgggatagtctccaggaagaaccccagaaaggaacaagtcatccaggagcacctggagggcttgatacaatgactgtttaccagctgattctagggcattgtgatactgtaataacaagtataaccaggccgggcacggaggctcacacctgtaatcccagcacttcaggaggccgagcggaggcagatcacctggggccagaagtttgagaccagcctggccaacatggtgaaaccccatctctactagaaatacaaaaactagccgggcttggtggcgcatgcctgtagtcccagctactcaggaggctgaggcaggagaatcgcttgaacccaggaggttgagtttgcaatgagttgagatcgcgtcactgcactccagcctgggcgacagagtgagaccctatctaaaaatatatatatatagccagatcgtaggctatcagccctgctcctaccacagggcctttctgcctgggacactctgctacctattagccttgttgctcacctagttcatatctagacttcttcaagctctctgctcagttgtcacatttccaggaagcttcccctgcccccactcctcctccccactcctgtaaggtcagacccccctgtggtaggctcccttcttcctggcaacgatcagagttgtcgctgtgcattttgttgcctaattcgttgagtggcatctcccttcccttctgtatcatcaactccctgaggtcagggccgatgtctggggcatctgtctttgtgtgttttatttcattttgctggcttgcctttgcaaacctaaagttgacacatgtaagtccccagtgaacacctgtagtgagaataaatcagcagttgtccgggcgcaatgactcacgccagtaatcccagcactttgggaggccaaggtgggaggattgcttgagcccaggagttcaagaccagcctgggcaacatagcaagcaagaccccatctcaaaagaaagttaagaaagtagccaggcattgccgggcgcggtggctcacgcctgtaatcacagcactttgggagg[138 bp omitted]gaggca[137 bp omitted]tgtagtcccagttactcaggaggctgaggtgggaagattgcttgagccctggaggtcaaggctgtagtgagccatgatcatgccaccgaactccagcctggatgacagagtgacacctcgtctcaaaaataaataaataaataagtaataagtagaaaagaaaaagaatacataagtttttttgtttgtgtgtgtttgtttttgagacggattcttgctctgtcacacatgatggagtgtagtggcgccatctcggctcactgcaacctccacctcctggattcaagcgattctcctgcctcagcctcccaagtagcagggactacaggcatgtgccaccacgcctggctaatttttgtatttttagtagacatggggtttcaccattttgtccaggctggtctcgaacttgacctccgcccgcctcttcctcctggagtgctgggattacaggtgtgagccaccacgcccagccataagcagtttttttaatgtcaggcactgttctgatcatgttatttcacacaattccctcagcagtcccagggaggggaagtgactggcccacgggcacgcagctgataagccgcaggcctggggtcagtccttggtctcttaaccaccaggctacataacggatactaagggcaatgaggccagctccaagctggcttcctggggctcaccactccatggggagagcagccgaggtgctctggagacgagctaagaatgttcagaactcagcccttcttcacttggtggctaaaagcctggttctggagcccatccagccgagttccaatccctgctccctctccctgagcgagccagtcaccctacctcagtgtcctcatctgcaccgtggaaatacacatcatacctatcattgtaagggttttgttttcatttttattttatctatttattttttcattttgagacggagtttcgctcttgtcgcccaggctggagtgcaatggtgcgatcttggctcactgaaacctccacctcccaggttcaagattctcctgcctcagcctcccaagtagctgggactacaggcacctgctaccatgcctggctaatttttttgtatttttagtagagatggggtttctccatgttggccaggctggtctcgaactcctgacctcaggtgatccacccgcctcagcttcccagagtgctgggattacaggcgtgagccacttcccccagcccactgtgagggtttaaataaatgctgcacgtgaagcccctggcacaatgcttgatgattattattagtagtttattcttttttttttgtttcttcttttttttttttttttttttttttttgagatgaagtcttagtcttgctctgtagcccaggctggagtgcaatggcttgatcttcttcgcggcaacctccacctcctgggttcaagttatttctggctaatttttgtatttttagtagagatggggtttcaccatgttggccaggctggtcttgaactcctgacctcaagtgatctgcccacctcagccttccaaagtgctgggattacaggcatgagccaccgcacctggcctagtagtttattcttgttccaatagttcctcatcatttgcagattccatatttgcaaatttgcctacctgtcaaaatgtatctgtaacccaaaatagtcctggaggtgctttcacagtcattggcagacatgcccagagcaggggaaacctgagccgcccacccaaggtgcaggtttccggctgaggtcaaacaaagtgaccctgtttcagctctcatcctgtaaacaatccccctttcaccacctatttcgtgtcacgtttttcacatttttgtgttgttggtggcaatttcgttgtttaaaatggccatgaagccaagtgcttctgaagtgccgtctggtgttcctaagcgcgggaggctgtgatgtcccttctggagaaagcccctctgatgggcatgctttgttcaggaatgacttgtagtgctgctggcc[135 bp omitted]gccaatcaggaggctgaggcaggagaatcgcttgaacccgggaggcggaggctgcagtgagccgaggtcatgccactgcactccgggctacagtgctagactccgtctcaataaaaaaagaaaagtgtctttaaacagaaacacatacaaacaaggtcatgtaatgactggttgacaaaaatgtgacgagagggtcaaaggaagcttactaactatagttcctccagtagccgtgactcgttcactagttgagagtttgcagtgactttatagaacagaactctcaagaataacaagaatcaactgtattgttgttataatttgttttggtttttttttttgttttgttttttgttttttttgagatggagactttctctgtcacctaggatggagtgcagtggtgtgatctcggctcactgcagcctccgcctcctgggttcaagtaattctcctgcctcagccacccgagtagctgggattacaggcgcccgccactttgcccggctaaattttgtatttttagtagagatggggtttcaccacgttggccaggctggtgtcaaactactgaactcaagtgatcctcgccccttggcctcccaaagtgctaggattacaggtgtcagccaccatgcccagcctgttgttataatatttaatccagaccgtacccttcctggcaggatcattatgtccgtttcacagaggagaggaaactgaggctctgtgcttgagcatcaggcaaccagaagtcaaacccaggcttccgcaccctaagatcggcattcagaggtgccttctctgtatctccccattctccgtccacaggcctcagataccaggggcaactgggagcttgcaacacccggaaaagccctcaaaggctcacaccatcacctcccatgagtctttgtccatggggggtcaccttggctcccctccaacccttgccctggtgattggaagcattccctcccgtcccgtatgatacgttcgcttgtttgtttcctgtcccctctggaatgcaacttctctgctcattccaccacctttgctgatgacttgagtgtcgagtgtgtgtcaggcagcgtcccaggccaactccaggagggcagggatgtgattttgtcccctgcttcatggctggtggctacgtcagaatgcaggatgtggtggggtctatggtcagtgcgtcacagcagccagcctgtaacagtcctgactgtgggcccagcactgtcatgtactaggtcagttcattctgatgcagtccgtgaggtgggtgctgtgacgacccattgccattttcagagcagtgacttgcctgaggtcatgcaggtataagccccagagcaaggattcaaagcaaggcaggggaccaggtgcggtggctcacacctgtaatcccagcactttgggaggctgaggcgggcagatcacctgaggtcaggacttcaagaccagcctggcca[137 bp omitted]catggtgaaaccccgtctctattaaaaataaaaaaattagccgggcatagtggcatatgcctgtaatcccagctactcgggaggttgaggcaggaggatcgcttgaacctgggagaggcagaggttgcagtcagccaagaacacctcattgcacatcagcctgggcgacaagagcgaaactccatctcaaaaaagaaagaaagaaagaaaagaaaaggtgtcagcagggccctgcttcctctggaggctctagggaaggatccttccttgcctctcctagcttctggtgtccttggcgttccttcagttgcagctgtatcactcccatctctgcctccgtcatcacatgactgttctctgtgcctgcgtcctcgtctcctcttataaggacaccagtcattgatttagggctcagcctcattcaggtctctgctcccattgcacctcctgggagaagcctcactcagtcgctcgtcattgtatagctatttgtttggagctgtgcaagggcagaggcctgttttgttcactgctggatccctgacctgtaacggatgctcaccttttgttgaatgagtgaatgagagacaaccgtttcgaaactgctgtggggggaaagctgtctaaaaggaacagcctccacgctgcaattctagcttcgtaagcggggctccaagctgctccttgccaagtgcctgctgtgccacggacgagctaggggcctttggcaaattgctgagcctctctgtgcctcagtttccaaccccttaaggtggagatcaccgtagttccccacctccagtgcttgtggtgagggtgaaatgtgctaatgaggggtcctggttatctcttgcccagggggctctgccctttgatgacgacaacctccgccagctgctggagaaggtgaaacggggcgtcttccacatgccccacttcattcctccagattgccagagcctcctgaggggaatgatcgaagtggagcccgaaaaaaggctcagtgtgagttgagggggggaccggcggaggggggaacagtggccgatgaagacagaaccccctagaaaagtcatggggatgggtttccagaacctgctcgtcagtccccagggtgactgggatcgccagctgagccgcagcccaaggtccagcacagctgccgctccaaactggggagggggctacgcaagattggggcggggagctccaggcagcgggagggcgcaggagtaaggaggcgaacaggatgccactgcgcatgcggcaaagtaatgcggccggtccggggtacacggagaccgcgcgtgcgcggggcgatgcactcagtcgccactagagggcgatgtaatatgtcatcctgcccccggtggggtgggcggggagatgatcagggaccccaaaaccaccccagtctttcattgcgcgcctacatgtgcctacgacctcacttctgcttctctacgactcaccaccctcacagctggagcaaattcagaaacatccttggtacctgtgagtatggggtaactggactcttgggtccctggcggaaataggggaggggccaaagcagtagaagcggctgggaggggtgggatgccagggttcctgagaggcaacgggctagggactcggacttatgggtcctgggggaagaggacacagctagagaaggagtctaggggtcagaggcaggaggggctaagctaggagtccaggactcccaggtttgagggaaaaagggactgggggcctggactcctggatccgagggaggaggggctgggggcctggacttctgggtctgaagaaggaggggccgggggcctggacccctcggtcggagggaaaaggggctggaggtctggactcctgggtctgagatggggggcgaggtctggggcgtctggattcctgggtatgagagagaaggggccggggcctagactcggatttcggggtccgggatcattgagtctagaatgaagaatgctgaatctcagaagcccggttcccaataatgtttctccacttccccagaggcgggaaacacgagccagacccgtgcctggagccagcccctggccgccgggtagccatgcggagcctgccatccaacggagagctggaccccgacgtcctagagagcatggcatcactgggctgcttcagggaccgcgagaggctgcatcgcgagctgcgcagtgaggagtaagaccccaagacccctgcacccgtgtacccacgtggggcgagctgcagcagctccctgcgcacatgcagagtgctgggcgaggaaccctggcctctcatggggcatggtttgaagctcccgcctgggagtgatggaaccagcggagaaaacggcccagaaacacgctgagaaagtattaatagatgctgcgacatagtacttacatatacatagtacttacaaatagttcttgcctggatgttaggtgttacagtgttattataattgagtgaaacacagctgagatgtaccctaaaccagagaaactgaccatactgatacctagaaaaaatggaaccatgggcagaaatacagggagcggaggagacctcctctgagcattgatgttggacctcagccctctgctacctctttccacctttcccaccccctgccttagggagaaccaagaaaagatgatatattatctgcttttggatcggaaggagcggtatcccagctgtgaggaccaggacctgcctccccggaatgatgttggtgagaaggcagggctaggggaccagacacctgggtctcgagattggaagaggctggccacggggaccccagattcccaaggaaagaaggggctgcaggctctgagcttccagctttagactgcttgacttgctctttgacatttatcaaatcccctctccactctaggcctgtttccccatgtgtgcagtttctgaggcagttgtacacagctgggtgaaaccatctcttgattgggttgaaactgttgtccctcagaccccccccggaagcgtgtggattctcccatgctgagccgtcacgggaagcggcgaccagagcggaagtccatggaagtcctgagcatcaccgatgccgggggtggtggctcccctgtacccacccgacgggccttggagatggcccagcacagccagaggtgggagcccctgtccctccaggaggatccacaatccctgggtctaggagttcaagattctaaccccagctctacctcaaatgtgctgtgtccttgggacaattcacctcccctctctgggcctcatttcctcacctggaaggactgtagaagtgagggaacatctgtggtttttgaaaccctcccatctgattttttttttttaaatctatcctggaaacagatcccgtagcgtcagtggagcctccacgggtctgtcctccagccctctaagcagcccaagggtaaggccaggtccccagtgggatttaagaaggagaaaggggtggagacatggagcaaagattgagtagcagaaactacaattcctgtgcagtcttgagacttgcttctttgtccctggagggccaaagacccaaggcctccaaagtattttggtccattggccatttctacctccttaggattgcatgcctgaagagattttacaaaagttagttgagtgcctgctgtgtactagtatctgcaccggctgggttttcagcccacagcatgatagaaagtctttgctatccttgctctggggcctgggaaggaggatacttggactacaagttgcagcatgcaccgggccagcgtccgtgagtgtgcgtgtgagtggggctcctagagcctcctgggagttgtagtccactcgcttatctcagtctcctgtcctctgcagagtccggtcttttccttttcaccggagccgggggctggagatgaggctcgaggcgggggctccccgacttccaaaacgcagacgctgccttctcggggccccaggggtgggggcgccggggagcagcccccgccccccagtgcccgctccacacccctgcccggccccccaggctccccgcgctcctctggcgggacccccttgcactcgcctctgcacacgccccgggccagtcccaccgggaccccggggacaacaccaccccccagccccggcggtggcgtcgggggagccgcctggaggagtcgtctcaactccatccgcaacagcttcctgggctcccctcgctttcaccggcgcaagatgcagggtatgggggcatgaactgccgagtcctaatgtggggagaggttggggctaaaaatctggttccagggatgtccgtctggcgtgtctagagaggaagggactgggggcctggattcccacgttctagagaagagggggtttgaagcagaggtgcacctgttggggagagaggtggggcctctagctctggaggaggaccccgattgaagggcacgcgcctttggggctctggattacctcccattggcccgtggtttgtgagccccgcccaggagggatggcttggccgaggctgcaacccaaggctctggaaccctgggagggggcgagtgcaggcctgtgtgctggcaactgggatgatgcacaggtgttgaccacgttctctgccttccccctaccagtccctaccgctgaggagatgtccagcttgacgccagagtcctccccggagtgagtctcacagggaaggaaagagtggggatgcaggggattcatgccctcggcgccttcctaaccctcctccaaccaccccctcccactcaggctggcaaaacgctcctggttcgggaacttcatctccttggacaaagaagaacaaatattcctcgtgctaaaggacaaacctctcagcagcatcaaagcagacatcgtccatgcctttctgtcggtgaggggcctgggtccccatcgagcctggcccccgcagaactacaagtcccagcagcccctggggctaaccaccttagcataggcctggcttcctcctggggctcatgggatttgtagttttatggccagagttggttagaagtcggtaggcaggaaagatttatcgtggccagaggcctggaattggggaaataggatcctgaattgcaatgtcctcaaggattggtgagttcccattcccctactgcgaggtttgaaactagccgaagaaacttcccaggcaatgttaaggctgccccattgctggtctgtggttttatgcctacgggtggatgggacttagagtttctgtgacagatatggctatgggaagcatttgtaaagggagcaagcagtgtttcatgtggtcttggagtctgaggctgtcacctagctatcagagtcctcatgatgttagggggatgtccaaccattcctcccttactcgctgataggatagagaaagctacaagtccttgcaggcagtggggcctcccaatgcatttcctgtccttctttccctccagtggctcatgggactcgtagttccttggccagagctggtcgtggggctgggtatccatttcctgggctcaccccttcctgtgttcctacctcgctcagatccccagcctgagtcacagtgtgctgtcacagaccagcttcagggccgagtacaaggccagtggcggcccctccgtcttccaaaagcccgtccgcttccaggtggacatcagctcctctgagggtccagagccctccccgcgacgggacggcagcggaggtggtggcatctactccgtcaccttcactctcatctcgggtgagtctcttggctaggctgcctgcagcccagtgctgggactgttcacgacagctgagacagtgtaggggcccaggagtgcagcagcaggaggaggaaatggtgttcagctggtgccgactctctgtgctcctcctgcccacacagaccgccccacaagcccatcctctatttccccactctcatcagcatttccctggcatttacagtgtaaataatgaatgcattatctccttgaagcttccaagcagcctactgaggtgttagtaatcacccattttacggaggagaaaactgagtcatagggaggtcaatggacttggccagagtcacacaatacactgtcgcagagctgcagcccaacccaggcctcccaacttcagaggagagagcccagctcttcctattactttaagatggtagagccaaagggtgaagacacagcacactgctgtctaatatcagtctgcccagagcagacattaccaattgatggcagtgcttattcctgctaagctcagtggcagcctcaggaacttgaactccaggcagccatgaccagtcgaggcttggcacaagaaaggaaaaccactaaaataccttgcttccagttctgctttctgtttggtccctccatcctgatagtgagcatttggatagggagggatatcgccgatctctttgtcaccaatattaatatgtcacaggtgggagaggggcttgccccaaagatttctaaaccaaacggctgtggaactgtgggtgttccgtcaccaaaaccaatt[139 bp omitted]cctgtctctactaaaaataccaaaataagcctcgcgtggtggtgggctcctgtaatcccagctactcaggaggctgaggcaggagaatcgcttgaactcag[141 bp omitted]atgatggctgactcctgtaatcccagcactttgggaagccgaggtgggaggattgcttgagcccaggagtttgagaccagcctgagcaacataatggacctcatctctacaaaacaaacaaaaaaatttatacacacacacacacacacacacacacacacacacacacacaatttaaaaaaaaaaaaaaagcccagcacggtggcatgcacctgtagtcccagctactccagagtctgacgtgggaggatcacctgattccaggaggttgaggctgcagtgagccgtgatcgcgccactgcactccagcctgagtgacagaatgagaccttgtctcaaaagaaaaaagaaaaagaaaagactttctccgatttctttttctttttttttgttgttgttgttgtttggttttttttttttttgagacagagtcttgctctgtcgtccaggctggagtgcaatggcgtgatctgggctcactgcaacctctgcctcctgggttcgagagattctcttgtcttagcctcccgagtagctgggattacaggcatgcgtcaccatgcccagctaatttttgtatttttagtaaagacagggtttcgccatgttggccaggctggtctcgaactcctgagcaacctcaagtgatctgcccacatcggcattccagagtgttgggattacaggcatgagcccctgtacctggctccaacttatttttcttacatttctggtccttcatggcctccgctagaaactaacagcaagcaatagtatctatttgaatagaaaccaacacctgttatttgaagttgaaggtatgtgagtttgaccgtgatccttaaatagcagcacagacccatttgcaaaccgtggattgatgtggccccagcggagcaggggagacggagatgcagggggggtgttgtgtgcttggtggagggactgggttctgcaggctgggacggccttcccggtcctggacccccagtcagtgtttttctgcccgcctgtgcctctaggtcccagccgtcggttcaagcgagtggtggagaccatccaggcacagctcctgagcactcatgaccagccctccgtgcaggccctggcaggtgggtggtggggccgtgggtggtggggggcgtgggtggcgggggccgtgggtggcggggggcgtgggtggcggggggcgtgggtggcggggggcgtgggtggcgggggcggtgggtggcgggcagaggtccagcatgagcaggtgctctggggtttggtttgcagaggacgcccagctggtgggctccttcaccattgtcgtagctgaggtcttatctgcagagttgtgagcaggttccccgagaggctggggcctgaggagggtctccttagcaacctgaggactggctcccaggagtccctaagaagatgacaggctctgtgttgggggtcagggaacatcctgccaacagaggttctggacctctgtccaggaggacggtgacccaccgtcctggtttgcttgggactgaagggtgtttctgggatgcagggctttgagtctaaacccaggacaaattggtcaccatctttgcaggtctcacaagtcacctcaccctggggctagggcctaatggtccctagcaaccagaattctaagctgagttcatgggaatgtgcaagatcttgctctggggaatccggccttcccgggctcccagtcctggtcatcaaagactcaaattctctagcaatcaggagagcagagggtttgttgcaaaggtgtcttagttcgttcaggctactataagaaaataccatacactgggcaacttacaaataacagaaatttattgctgacaattctggaggctgggaagtccaagatcaagctgccagcagcgttggtgcctggtgagagctgcttcctgggtcacagacagcacgttggtgctgtgtcttcacatggcagaaggggcaagggaactctctggggcctctttcctaaggacactaatcccattcatgaaggccccaccctcatgacctcatcacctcctaacataacctcctaataccatcaccttgggattgggtttcagcacatgaatttgggaggatgcagtgttcagtagagagcataaggggcactcgcccaagcaaccagaggtagccagaattctcaagggaagagagcgcctgccctggaaatcagccctcattcctgagacacggggtcacaggggacacagtgaaacagggtactgggccccattgcagggcacgtggacagccgtctgctctgaggggagtcaggcagcatcagcctcacaggacccatgccccttcctggacccctggaccccgttgaaaggaaacggcccagcgttgaggccaggagccagggcagctttggccttgtcaccagaaactctgagtcccagggtcaggtcttttgctctggagccgtggttctcaactaggggagctggtttcaccccgtgtttgttttctatggccgccgtcaacaaatgacacagccttggtggctgaaacaacacaagtgattttcgtacagtcctggaggtcagaagtcccacatggtctctgcaggctaacagggtgcctggagggctgcacctggaggctctctggcagagactgtttccttgtgtgttccagttcctaggcgctctggttaaggcccgttcctccatcttcaaagccagtgacgccatatatccctctgactgaccttagctgggaaaaggtgactcagtgggacctgcacagatactccaagataatcccccaactcgtggtccctcaccttccccacagcacaggatctcttctgctgcatcaagaaacatagtcacaagttctcggtatttgcatgtggacatctttggagggggccgttattcagcctagcccaaccccctagggacatttagtaatgtctggagacatttttcctcccctcaactggggaaaacagggggatgccaatggcctcttgtaggtggaggccagggatgctgtaaaacaccctacaattcacagaacagccccccacgacagctgggtcccaaatggcagtcgtgctgaggtgcagaaaccctcttttctcatggttgctaggggcaaccggaaagcaaattaggtccactggaccccgttgccgaggaaagctggcctcagcaaccaggggtctcaaaacgggcacaccctggaagatgtaggactaacaggcaccctggggggctcagccaccatctcataaaggagaatggggtggggggtgcaggcctccgagtcaccgtggttgctatgacaagccccccagtttttgtttttgtttttttgagacagaatctccctctgtcgctcaggctggagtgcagtggcgcgatctcagctcactgcaacttccacctcccgggtttcaaatgattctcccgcctc[134 bp omitted]cagcctcccaaaatgctgggattacaggcatgagccactgcgcccggcccactcagtttctcttaaaagaaaaacgaggtctccgccacgggacctcaggtaacatcctaggccccatggaaattgctggagaccacccagcaaccagtgtttccacctcagtccccaagaggaggtggcctcaggacccaggagacagtgacctgagtcaggctggcccagcatgaggggcctgagacccccccgactccaccagtaggctcccttgagcccagttccatggaacatttctccctaacaaccagggtaggagagagtcggggggcccctcttgctgtgaacgttgagcaccgtcctggcaggctgtttcctagcgaacagtatcataaccagaatctgagagtctcctaaagtcaggcccggcccaggcccccttggactaacctggccccagggttgcagggggcatagggtgcagcccccgtcctaggggagtcaggccttgccacttggggtgtgtcctccgagtaaccaattcaaggccaggtgctggacggactgggccttatcagggattggagctagagcctcggggttactgagaccgactgatgaggagactctgcccccatcccctggtaatgggaaccccaaccctgggctgcggaacccacgaaaaacctcttcctcccttgcagacgagaagaacggggcccagacccggcctgctggtgccccaccccgaagcctgcagcccccacccggccgcccagacccagagctgagcagctctccccgccgaggcccccccaaggacaagaagctcctggccaccaacgggacccctctgccctgaccccacggggccggggagggaggggacccccctccaccccccttccgtgccccccaactgtgaatctgtaaataaggcccaaggaacatgtcgggaggggggtggacacaaaaaccggccttgccctgcagggatggggctccacaggccgtgcccaactgggggtggttctaggggaacagggggcgggggagctgtttctattttatttattgattaatttattattttatttattgatcaatctctctgcggggtggggtgggggagggacgggagctggttggggtggcttagcagatccggacagggccctctgtccctgtgtcgtccccaaccccctcttcccgggcccctcctcccctggtcctccccccacgaccttctgtacggatttgctctccggaaggaattctggtttcgcgtgatcctgcctgcgtccgtgtctctgattccgccggcggcaaaaaaaaaaaaaaaaaaaaaaaaaaaaagataataataataaatagccttgatcagggacagctggctggccttggcctctcgattcctgggtgcccagttgcaggggcagggcccgaaggcggggacggggatgctggctgccaccagctgttcagaggccctccgcgccggcacacaggtcctccggctccaggtcagtcagcggcagccccagctggttggagagatctccagtggctcatcttgctgggtgcggggcactgggattggccccatctttcctgcttcactggtgagggcaaggcccgggtcagggtgcctgctacagctggaccggcagggagatgggggaggccggcggggggctgaggctgggccacggctgaacacacagggtgcagctctccagggcggagaagtcaacggctaagagaccgaagagcgcgaacagcagcatggccacgacccactcgcaggccgcagagacgctacgcagcgagcaggcgtggaggacgatcactgccccagggtcaagggccacactgctaccgtgacagacgcggagcccggcctggtctctgtgccgcctcgcgctgggcggaggccgtctctgggtgtccccatcctcagctctccccttcccccgtagctcctcacagacggggcctcgccttggtctccgatgctctccagccggtctccatctcaagctgcttgcacatgctttcctttgcgtgcacccccgttactattgcaatcctaatatcctgaaatgtttctgtctcccttccctgacccagggaagggcctggttgcctccctacttgtccaggacatccagctgccattgctcctgcctgtaaacatgcatggtttcctaaatacgcctccctccctgccgccagcctcggactgtgttttgcaactttctcctgaacatccaccccgctacccatggcctacaggcccttcctgctcactcccagagcctaatctcttccctgtaaaatctgtttctctgagtgtcccctcctccacgacaactccaccatccactcatgtgccccagcagacactcccccggccctctcttcatccttcttggccagctggtcaccccaagtcttgtcctatctgccttacccatctctctccagccctctcctcatgtcttgtgcctttctctcctggtctgtcccgtccctcctctggttctcgcaccctgctagctccttaagacctttttctgctctgccagcccctgcagactccaggcctagtagagacagcatttgttttctggaacttctctcactggagctgctcaccacttcacccctcccagacagcttattccattcattcagggatttctaagggggctgagaagtggtggctcacgcctacaatcccagcactttgggaggccaaggtgggaggattgcctgaggctaggagttcgagaccagtctgggcaacagagcgagacctggtcttttttttgaaacagagtctcactctgtgtcccaggctggaatgcagtggcgtgatctcggctcactgcaacctctgcctcccaggttcaagcgattcttgtgcctcagcctcctgagcagctgggactacaggcgtgtgccaccacacctggctaatttttgtatttttagtagagatagagtttcaccgtgttggccagacaggtcttgaactcctgatctcatgtcatccgcccgccttagtctcccaaagcgctgggattatgggcatgagccacaatgcctgaccgtaaacttcctatggctctctatcacccccaggcagaaacccaagcctctgatccctaattttagagaatcctcagccctggccctgccagcagcctcactcctccctgggctggtctttctgctcggtgcgtgtacctgcagtgtgccctcaacctcccagcccacgagcagctccttctgcaaggccaggctcagaatccggccaggctcaggcccgtctttacagacgtccatcccttacgacactcagctagctgtctttatggttccctcccccacctaccccacccaagagactactgagtcccacagaatgaaggcccctgtggctaaactgatcatcagggctagtttagaagatctgggctggatcttatcaccatcagggcccctgcaaaggagacctaatggtctcataccccaagtcactataggccgggctgaggggccagccctctcaactattttgtgaagatacactttgtcactccaggaaatacgatcaccatttccattttgctgagaaaatttccaagaaacggatgcacttaatacaaccaacacagggccttagctggtttctctgtactctcttctgaatgcctgcacactctgggcctccccacaaatgagaaagaccccccaaggctgggttttcagcccctcctttctctcactcta[135 bp omitted]accccatctctactaaaaacacaaaaattagccaggtgtggtggtgcatgcctgtagtcccagctacttgggaggctgaggcacaagaattgcttgaaactgggaggtgggggttgcagtgagccaagatcatgccactgcactccaccctgggtgacagagtgagactccatctcaaaaaataataataacaagataataataataataggccgggcatggtggctcatgcctgcaatcccagaactttgggaggccaaggcaggtggatcatgaggtcaggagttcgagaccagcctggccaatatgatgaaaccccgtctctactaaaaatacaaaaggccaggcacggtggctcacacctgtaatcccagcactttgggaggccaaagtgggcgcatcacaaggtcaagagatcaagaccatcctggctaacatggtgaaaccctgtccctactaaaaatacaaaaaattagttgggcatggtggctggcgcctgtagtcccagctactcaggaggctgaggcaggagaatggcatgaacctgggaggcggagcttacagtgagccaagatcacgccacttcactccagcctaggtgacagagcgagactccgtctcaaaaaaaaaaaaaaaaaaattagccaggtgtggttggcaggtgcctgtagtcccagctacgtggaaggctgaggc[131 bp omitted]caaatccattttatggatatggaaactgaggcctcagagagtgacctgacccatctagaagtacactgtgctggtggaaagtgcctcggttctggggatggctcagaaatgagttggaattgagtcaagcctcatgtggtgtgctagtaaatgtttaacaactggctctggttggtggcatctgccaattacagtggtataaatactcccatgatggctatttcaagctactcacatgatatcacaggacatggagttcggacgagcagttcacagaatgcctctcagagcctgcgcaagccacctgcagcctatcaccagctccattgcagaacctcacgcgcatcctggccgaaagacttttcctgtctgaacccgtcttcactcgtaaccacatgattcctggcacagagcaggtgccctcaagggactgttcttagtatatcattcttccagcgtctattggtcactcgctatgtgccaggcacagatctaagcaccgtatgcctattatcctatccactccacaaccctgaggtcagccctgtcgttatccacatttgagggatgacgaaaccattgacaccgagaagtaacagcccgcggaagtttcccccagctgctgtgtggaggacaggggcttccaacctgggcaacctgaccccgaagtcggcattctcgatgacaaagccataatcctgtgcaaagagtgaggcccagagaaaggaagagacatccccagtgacagacagccaggcaggaagaccaactccagtgaagagccacctccaagccctaccccggatacaagaaggatactggccacaatgaggatggtgcagacgctgcagaggcccaggcggaggggcccaatccaggcagccccgggctggggcagcctcttcagcctccacaggaggagctgcagccagaagtagacgttacccaagatgaaggcaaggaaggcccctgccaagtgcgtaggccgctggttcttttcctgggaggagaagggagaagttgggagggagactctgggaaggagggtaaggggcaccagaggggccagggcccttcaccaatgcagtagacagtggtcaccaactttccatacccagtgatgggcttattaagcacatcagctattgtcagctccacgagagcaggcattgaaatctgttgttcactgctgtggcctcaattcctagaacagtgatgggcacatagtagatgctcagtaaatatgagtgggataaatcttgcattctcaaggcgggggacagacatttccccaaaaattggtcttgcaggtgaaaaattcttaaatattacaattgtatgtgactcacggatacatagcacatattccattaaaattttaaaatacttaaaattttggcctggtgcggtggctcacatctgtaatcccagctctttggaaggtgaagcaggcagatcactttgagctcaggagttcaagacccacctgagcaacatggcaaaacctcgtctctacaaaaaatacaaatattgccaggcatagtggctcacacctgtaatctcagcactttgggaggccaaggcgggtagatcacttgaggtcaggagttcgagaccagcctggccaacatggtgaaaccctgtctctactaaaaatacaaaaaattagctaggcgtggtggcgggcacctgtaatcccagctacttgggaggctgaggcaggagaatcacttgaacccaggaggcagaggttgcagtgagccaagatcgcaccattgcactccagcctgggcaacaagagtgagactccatctcaagaaaaaaaaaaatacaaatattagccggtcatggtggctcaggcctgtaatcccagctactcaggaggctgaggctggaggattacttaagcccaggaagcagaggttgtagtgagctgagatggcaccatcgcacaccagcctgggcaacggagcaagatcccatctcaaaaataaataaacaaataataaataaataaaataaatacttaaaatttcatgggaagaggggagaaccagggggaaatgtctaaaaatactccttagaggagcaagataataataataggttgagggctgggcacagtggctcatgcctgtaatcccaacacttagggaggccaaggtaggcagatcacttgaggtcaggagtttgagaccagcgtggccaacatggtgaaaccttatctctactaaaaatgcaaaaagtagccgggcgtggtggtgagcgcctgtaatcccagctactctggaagctgaagttaggagaatcacttgagcccgggagatggaggttgcagtaagccaagatctcaccactgcactccagcctgggccacagagcaagactctgtctcaaataaataaatagttgtggagcactttgggaggctgaggtgggtggctcatttgaggtcaggagttcaagaccagcctggccaatatggtgaaatcccatctctactaaaaatacaaaaaaaatttagccaggcctggtggcaggtgcctgtagtctcagctatttggtaggttgaggcaggagaatcgcttgaacccagcaggcggaggttgcggtgagccaagatcgcactactgcactccagcctgggtgacagagcaagactccatctccaatatatgtatatatataaatatattctctgtggtccatgggcaatgagtgacctagctagagtcttcatggagatggaatgaagtcatgtacaaaatggaaagcctgctgccaatggctgccaaatgctcaatcaatgtgcctaacatgaagaatgagtaaatctcagtcatttctttttggagacaaggtctcactctgttcaccaggctggagtgcagtggcacaatcacagctcactgcagcctcgacctcctgggctcaagcaatcctccatcttcccacctcagcctcctgcatagctgggactacaggttcacgccaccatgcctggctaattctttattttttgtagagacagagtcttgctatgttgtccaggctggtcttgaactcctgggctcaagcctcagcctccaaagtcctgggattacaggcatgaaccactgtgcccagcctcactaatttcttttttcttttcttttcttttttgagactgagtctcactcttgcagcccaggctggagtgcaatggcatggtctcggctcaatgcaacctctgcctcccgggttcaagcaattctcctgcctcagtctcctgagtagctgggcttacaggcacctgccaccacccctagctaattttttgtatttttagtagagatggggttttaccgtgttggccaggctggtctccaactcctgacctcaggtgatccacctaccttggcttcccaaagtgctgggattacagccgtgagccacagagcccggccagtaatttcatcttcttcttcttttttttttttttttttttttttttttttgagagaagtctcactcttatcccccaggtttgagtgcaatggctcgatctcggctcactgcaacctccacctcccaggttcaaatgattctcctgcctctgcctcccacgtagctgggattaagtcgcctgccaccatgcccggctaatttttgtatattttaggagagacggggtttcaccatgttggttggccaggctggtctcaaactcctcacctcaggcgatccgcctgcctccgcctcccaaagtgctggaattacaggcatgagccactgcgcctggaccagtaatttcatcattaaataagctggggagaggggctggcagaaaattatcccaacgtcctggaagtcaacgaagtcctacatacaaacagcctcgctcgtagtgccccactcagagagcaaaggaatccagccggtccaaggccactggccagagaaaaatacaagtcccaggagggccgggcgggaaccagcccccgagacaataagcctatggccacggggcatgctgggagttgtagttccagacgccggccgggacagaccctgggcgccgactgggtctcacctggaaattgcctaccacggaggtgcccagggcacacagaagacccgtccataggatcagctggttaggccaccttctgacgccccagtcccggagctggtggtaacggacaatgcagatccacgcggctgggagtagaggggagaaggaagtgggagggagacccaccaagaactcctgggacccagggagggaagtgaggggagcaaggtgagggagaaagtggcaaactcccggattttggggaaagaggggcctggggcatggactcctgggtttgagaaaggagcggtttcggaactcgcttggctgggcttgggagcactgaaccaaagggctgggcaatatttacccagagcagctcccatattgagcacctggctgaagatgcagctctgaggggggaaggatccgcagatgctggggaagacaaaggggtcatcctgggcaatccaagctagggcctccactttcctgcagcggcgatccccccaaatccctaccctcgggcagaattacctgatgtagggaaagcctttactgaggtccacagtcctgttggtcactgcaatggcaaaactacggaggaaatcagagtgagtgggcgactctcaccaacaacttttccttctgttaaccaaacaaacaaggacttctagccccctccaccctcagaccaggagtccaggcccccagcccctcctccctcagacccaggagtccagatcccccagcccctcctccctcagacccaggagtccagacccccagcccctcctccctcagacccaggagtccaggcctccagctcctcctccctcagatccagggatccaggcccccaaccccttcctccctcagacccagaaatccaggccccagccccctccaccctcagacccaggagtccatcatgcctctgacactcacacgatccagacgccagagatagcccagacagctaggaagacaggcatcagcgacaggtagccccacatgccgggctctgcaggtgaaggatcggggctgaggctggacacctgtctctctcacacctgaagaaccagccctcaaggagggcccaggtgcatgagattgtggccccaaccactaggccccgcttggctctcaggcagaagtcacctgtaggggtctgatctgattggccagctctccatttccaggcaatttccccacctatcccgcagtgttcaaccctatctcacgcattctcctgcttgaggaatttctccctgtcctcccagcccctccttgcacctcccagcctctccttgcacctcccagcctccaggacctcctggagatgctcacctctccaagatccctggggctctcagtcctgggactggggctgggtgagcttagggaagaagggctggcattcgggatggggctcagacaggccaaggcagaggcaaagtcccagctggagcgctggagggctgcctggggtcttgggtctgaccaacacttcctgaggggctctctacctccaaaccgccatgtcctccctcctcagaacctagcaggcagcaccttagcttcaggggcccctaacttccttcctccagctttgtgggttcaacgtccaaagtctcagcccttccctccccaggaaccaggaatctgagcctccagctctctccagcctggaagacccagaattccggggccccagttcctcctagaatacagatattcttctccagctcctgatgtccaacctcccagctcttacctactcgggtacccaagagtgagggcctcaggtcggcctgctctctgggtgaagcttctgttttggggctgggagatatggagcactgacaaccctgcctcctcccctccactctccttcctctcacccttctccttttgcctgctggagttccccaggcaggctgagcatgggtgggaagggagctttcagcgatgacatctccatccgaaaattcccccagccagacaaagactgctcctgccgcctgacccttttccttctctctcccaacagccatcttcagcttctgacctcctcctggcttggtatttagggatttggagtcatggcctcttccttcttcccaggacccaggagtccagtccctcagcccctcctccctcagacccagggtcagacctctaggccctccttccttagactccggagtccctcctgcctctgacactcacgaggtccagaccccaagatagcccagccagcagggacagggacaggtaagcctcacatgctgggctctgcaggagaatgagaggggctgaagctgggcccctctcgctttcctctttctctctcctccccttcacacctgaagaaccagccccttggggagggcccaggtgcatgagattgtggccacggcctctgggcccccattggctctcaggcagacgtcacgggtgggggtctgatctaatcggccagctgtcctccactccaagcaatctcttcacctgtttcagtgttcagtcctagctcacacattctcctgcttggggagtttctccctgccctcccagcccctccgtgcacctcccagcctccagggcctccccaggatgctcacctctccaagcttcctggggctctcagtcctggagctggggctgggtgagctcagggaagaagggctggcattcggggtggggctcaggcagacatcctgcagaggcaaagtccaggctgcaggactgcctgggtcctttggtctgactgccacttcctaacggctctctgtccccaaaccaccgtgtcctgtctccttagaacctcacaggcagcaccgtagctttgggggaccctaatttccttcctccagctttgtgtattcaacatccaaactctcagccctatcctcccctggactcagatcggagcctccacccttggggacccaggagtccaagctccaactccttcctccttccccaaaatgcaggagtccaggcccccagaactcttcccttagacacagaagtcccagccacctcctctctcactatgccacctcgtgtcttttaatggacataaaatccacataacattagccattttaaagtgtacgactcggccaggcacggcggctcacgcctgtaatcccagcagtttgggagaccaaggtgggcagatcatctggagtcaggtgtttgagactagcctggccaacatggtgaaaccccatctctactaaaaatgcaaaaattagctgggtgtggtggcgggagcctgtaatcccagctactccggaggctgaggcaggagaatcccttgaacctgggaagcagaagttgcagtcagtccagatcatgccattggactccagcctgggtgacaagagcaaaactctgtctcagaaaaaagaaaaaaaaaatgtgcgactcagcgacattagtgcactcccaatgttatgcaaccatcgcctctttctttttttttttttgagacagagtctccctctgtcacccagattggagtgcagtggcgcaatttcggctcactgcaacctctgcttcccgggttcaagtgattctcctgcctcagcctcctgaggagctgggattacaggccggtgccaccatgcctggctaatttttgtatttttagtagagatggggtttcaccatgttggccaggctggtctcgaactcccaacctcaggtgatccacccgcctcaggctcccaaagtgctgggattacaggcgtgagacactgcgcccaaccttttttttttttttttttttctgaaacagagtctccctctgttgcccaggctggagtgcagtggcacaatcttggctcactgggacctccacctcctgggttcaagtgattctcatgcctcagcctcccaagtagctgggattacaggtgcccgccactatgcctggctaatttttgcattttttgataaagacagagtttcaccatgttggccaggctggcctcaaaatgctgacctcaagtgatccccctgcctcagcctcccaaagtgctgggattacaggcggaagccatcgcgcccaacccgtctggtgtattttatgctcagtgtaatgtttttgagattcatccatgttgtggcatgtattagtgtttcattcctttattttttatttttattttttaaacagccagggtcggctgggcaaggtggctgacgcctgtagtcccagcactttgggaggctgaggcaggtggatcacctgaggtcaggagatcgagaccagcctggccaacatggtgaaaacctgtctctactaaaaatacaaaaaaaaattagctgggtggccgggcatggtggctcacgcctgcaatcccagcactttgggaggccg[132 bp omitted]gaggcaggagaatcgcttgaacccaggaggcggaggttgcagtgagccgagatcgcaccactgcattccagcctgggcgacagagtgagactccgtctccaaaaataaataaaataaaataaataaataaaataaaaaataaatcctgtcccagtggggctgatagagggcaaagctctccaagtcctcctcaccccttctgctgccaaatgcctctcctctgggtctcgtcttcctcctttcgcttctttttccggaggtctccgtttgcccagacatgaatctgagccaccccctgccctcaggggaatccctgtctgtgggcaacacagatgatcagcaggtgacagctcctctaaaggaagtcacacaaagctatgagggagcccaggggagggaggggtccatgctacctgctcctccgtcggccctcaacactgatctcctgccctgccctgtcctgtgtttgccacctggctgattcccacttctcttccaaaaacataataataataaagacgagaaagcccaggtgatcctaaggaagacttgtccccgctctgagcctccatacccaactcggtgtcctggcacaaagatgagtttggctcactggtgtccccacggtgcttatgtgacctgcttggaccctccctgggaggacaggggacagggctccagcctgccgagctactttcaagttgggaattaggccccactcaccggccacgggtaggttgggtgtctggagcctgaaggatccttccagaagctagggctgctggcctggctcagccgaggggaagaggctgtgcttttcctctgagaaagatgacgttgcactttcatattgaggaaaccgcttgtggttggtggtggggactggtttttatttttatttttatttttttattttattttttatttttgagacggagtttcgctcttgttgcccaggctggagtgcaatggcgcgatctcagctgaccgcaacctctgcccccgggttcaagcgattctcctgctcagcctcccaagtagctggaattacagtcatgcaccaccacacccggctaattttgtatttttttagtagaaacagggtttctccatgtcggtcaggctagtcccaaactcctgacatccggtgttccacccgcctcggcctcccaagtgctaggattacaggcgtgagccaccgcggccggcctatttttatttttatatccctagatgtctatgtcccctgcctggaagtttccccagagaggggatgtagacgtctaggaacacagaggtctcagaaccttccccagggaggggatgtacacctctagagatagatgggtctcggacctctgttttcttgtctgcaaaacagggatcatgatggtctgccctcgtgcaattgtgagggtttattggggttatccacataagaccctaaaagaatgcctgtctgaccgggcccggtggctcacgcctgtaatcccagcattttgggaggctgaggcgggtggatcacctgaggtcatgagttcgagaccagcctggccaatatggcgaaaccccgtttctactaaaaatacaaaaattagctgggcatggtggcgggcgcctgtaatcccagctactcaagaggctgaggccggagaatcgcttgaatccaggaagtggaggttgcagtgagtcgagattgtgccactacactccagcccggacgacaagagcgaaactccctctcaaaaaaacaaaaaagaaagaaagaaaagaaaagcaagagattgactggggatgaggttgctgaaggataaaggaggagaaaggccaggcgcggtggcttaagcctgtaatcccagcactttgggaggc[137 bp omitted]ttcagactgcaacgtgagtgggtctgggtctgacactggagaaaggagatggggagagtggaagaatcacagaccatgtgcagttctgagaaccccggtcaggtcagctgggaaatgtggtgcaaagatcacccatacgcaagtccatggagaccgaaagcaagtcagtggttgcaaggggtgggaagaggggaggatgggaaatgattgcttatttggagtttccttatgggggttatgaaactgttttggaactagatagagacgaaggttgcacaacattgggactgtgctagacgacaccgaattatactttaaaatgcttagagtgggccgggcgccgtggctcacgcctgtcatcccagcactttgggaggccgaggcgggcggatcacgaggtcaggagatcaacaccatcctggctaacatggtgaaaccccatctctactaaaaatacaaaaaaattagccgggcgtggtggcgggcgcctgtggtcccagctacccgggaggttgaggcaggagaa[131 bp omitted]atttaaaaattaaatttaactttttttttttttttttgagacggagtctcgctctttggcccaggctggagtgcagtgacgcgatctcggctcactgcaagctccgcctcccgggttcaaaggattctcctgcctcagcctcccgagtagctgggactaaaggcgcccgccaccacgcccggctaatttttttttttttttttttgtatgtttagtagagatgaggttccactgtgttattcaggatggtcttgatctcctgacctcgtgatccgcccgcctcggcctcccaaagtgttgggattacaggtgagagccaccgcgcctggccaaaaagttaaatttaataaataaataaataaacactttagcacattgactttagaggtgtccacattgggcagaaacggccaggctctgctccccaccccatgcttagtcatcggtcaaggctgcataaaaagaatgtaatagcaatccaaatcaaacactgctgaaggtgctactgctggaggctggagaccagctgaagtcctccctgctaatcaagttctttcaggaagggtgagccacctggctaccgtacttgcccaatgtcactcagctaccgagtggagcagcttgggtctgtctggctgtaaagtttggttccttcctatgtgccatgcaatgcccttgaatatccctccttatcttcacccatccaaccttctcctgaaacatccatttatctgtgcatatgttcatgcctttgtgcattcctccagctagttatttctccactcatccacccacctgcctatccggccagccatttgctcatatgttcttttttttttttttttttgagatggacttttgctcttgttgcccaggctggagtgcagtggcgcgatctcggctcactacaacctctgcctcccgggttctagcaattctcctgcctcagcctcccgagtagctggggttacaggcacctgccaccattctacctagaagtagaattactgggttgtatagtaacatttttaggaactgctaaactactttccgccatgtgtacacgatttacaccattttacattcctgacagcagtgcatgagggtttcaatctctccacaccggcaacagtgcctgctattatcggtctttttaaaattacattacaatcttttttagggatgagatctggctttgttgctgaggccagagttcagtggctattcacaggtagtgtcatagcacactacagcctcgaactcccggcctcaagagatccctttgcctggccaggagtcatgcctgtaatcccagcactttgggaggctgaggcaggcggatcacttgaggtcaggagttggagactagcctgaccaacatggcgaaaccccgtctatactaaaaaaaaagaaaaattagctgggcatggtggcacacgcctgtaatccgagctactcgggaggctgaggcaggagaatggcttgaacctgtgaggcggaagttgcagtgagccgagactgcgccattgcactccagcctgggtgacagagcaacacttcatctcaaaaaaaaaaaaaaagagagagagatcctcatgcctcagcctcctggcctcaagagatcctcctgcctcagcctcctggcctcaagagatcctcctgcctcagcctcctggcctcaagagatcctcctgcctcagcctcctggcctcaagagatcctcctgcctcagcctcctggcctcaagagatcctcctgcctcagcctcccaggtagctggaattacaggcctgtgccaccgtcccccatttgatgtgtctttctgatggtaatcattctggagggtgtgaagtggtgtctccttgtgggttgaatttgtattgccctagtgactaatgacgttggacatttttccatgcattcattggctatttgcatatttctttggagaaatgtcagatctttgttcatttttgaaattcggttgtctgtctttttattattgagtcataagaattttttttttttgaggtggagtctcactgtgtcacacaggctggagtgcagtggcatgatctcggttcactgccatctccacctaccaggttcaagtgattctcctgcctcagcctccggagtagctgggattacaggtgcctgccaccataccaggctaatttttttttttttttttgtatttttagtagagacagggtttcaccatgttggccaggctgatctcgaactcctaaccccaggtgatccacccgcctcagcctcccaaagtgctgggattacaggtgtgagccaccgtgcccggcttagggattctttgtgttttttttagatggagtcttgctctgtcgcccaggctggggtgcagtggcgcgatctcggctcactgcaagctccgcctcctgggttcatgccattgtcctgcctcagcctcccgagtagctgggactacaggcgcctgccaccatgcccggctaattttttgttgttgttgtttagtagagacagggtttcaccatgttagccaggatggtttcgatctcctgaccgcgtgatccgcctgccttggcctcccaaagtgctgggattgcagacgtgagccaccatgcctggccaaggattctttatatattctggattataaggcgatcattatcagatataatgatttccaaatattttctcccattcaatggataacaatcctcttttgacctaatattccctcttttcttcaggatctgacttcttgcattgttgtggttagtcattgactcattcagcaatttttttttttttttttttgaggctgagtcttgctctgtcacccaggctagaatgcagtggctcaatcttggctcactgcaacatctgcctcctgggttcaagcgattctcctgcctcagcctccctagtagctgggattacaggcgtcgccatcacacccggctaatttttgtattttcagtagagacagggtttcacca[139 bp omitted]actgctttttgatattgagactcaactctgaacaggacaagggtcctgccctcctggcacttatgttctagcaataaacgaataaataaagagatatgtagtggtagccagggggaggtaacctgtgtagccaccaggggccccattctcagaagc[133 bp omitted]actccatctctactaaaatacaaaaaattagctaggcatggtgggaccttaccagggtgagtggtgggaagaatagttccaataaggtgagagaggtaatgaggggacaaactgggcggggcccgggggccattgtaagaaagttagatttttttttttgagacggagtctggctctgtcatccaggctggagcacagtggtgcgttctccgcttactgcaacctctgcctcccgggttcaagtgattctcctgcctt[134 bp omitted]gcctcccagagtgctgggattacaggcgtgagccaccacgcccggcctagaaagttagattttaatctaggcgtgtgctaattcagcacagcaactccagaaaacgataaacatttacttcacctggtttttatgggtcatacatttcggaacggcttagctgagcgattctggttttggggtgcttggaaggttgcagtaagacatggaccagggctgcacagccacctgaagacttgatggacaccggaggattattgccggggtggcccaagcacgtggctgacgagctatcgggaggcctcagctcctctccggctgctggcttgaggcttcagttcctcgaaacatggacctctccgcagggcagctccaatgtcctctctctctctctctctctctctctctctctctctctctctctctctctctctctctctctatatatatatatatatatatatatatatttttttttttttttaaagacagggtttcgctctttggcccaggctggagtgcagtggcgcaatcttggctcactgcaacctccgcccaccgggttcaatgattctcctggctcatcctcccaagtagctgggattacaggcacccgccaccatgcccggcaattttttttttttttttgtacttttagtagagacagggttttgccatgttggccaggctggtcttgaactcctgacctcaggtgatccacccacctcagcctcccaaagtgttaggattacaggtgtgagccaccgtgcccggcctgcaacgtcctcttgacatgggcatcccagagagagcaaagtgaaagccacagagtttttttaggatctaacttttgacacaccatcatttttgcaatatcctgttggttacacagctcagcactgttcgaggtggaaagagccacacaaggatatgaatcccagaagtggaggatggggggccgggcgtggtggctcatgcctgtaatcctagcactttgggaggctgaggtgggcggatcacaaggtcaggagttcgagaccagcctgaccaacatggtgaaaccctgtctttaccaaaaattcaagaattagccgggcttggtggcgcgtgcctgtaatcccagctactcaggaggctgaaagagaggagaatcctttcaacccaggaggcagaggtggcagtgagctgagatcgcaccattgcactccagcctgggcaacagagcgagactgtctcaagaaaaaaaaaaaaaagaagtggagaatggggggtcattgagggccgttttgggagctggctaccacaaaatatcaattcattgcaaaatttgagtaggagaatgatgaggtgtgtgtgtgtgtatgcaatcatatatgtatatagatatagctatataggtccgtgtgtgtatataaattaatatatagtatacaataagtatacttatagggccagatacagtagctcatgcctgtaatcccagcactttgggagcctgaggcagtaggattgcttgagcccaggagttcaagaccagcctgggcaacatggcaagacctaatctctacaaaaaataagaaagccaaatgtggtggtgcatgtctgtggtcccagccactcagaaggctgaggcaggaggatggcttgagctcaggaggtcaaggctgcagtgagctaggatcacaccactgtactcgagcctgggcgacagcgtgagaccctatttaaaacaaacaaacaaaaattattgaatatttgaccaggttcccgctgaggctgagccttggaatctgtattttaatcacattcccaaggtgactttgactccccacaccccacctttttttctttctgtgtgtatagttcaacacaaaaaacatcaaattcaccattttacagccagatgccgtggctcacatctgtaatcccagtgtgtgggaggctgaaactggaggattgcttgaagccaggagttctggaccagcctgggcagaatagggaaatcccatctccacaaaaaatttaaaaattagccgggtgtggtggcatgtgccggcaatcccagctacttgggaggctgaggtgggagaattgcttgagcccaggagagcaaggctgcagtgagctatgattgtgtcactccagcccgggtgacagagtgaaacgctgtctcaaaaattaatgaattggttaaaattttcattttaattaaagtgcaaaactcggtggtaggtgtgtgagcaatgtcgtgaggccatgccgtgagttatgatcacaccactgcacttccacctaggtgacagagagacacttatatgtgtctctaaatatatatataccattttaactattttattttatttaccattttattattttttgaggcggagtctctttctgtcacccaggctggagtgcaatggtgcgatctcggctcactgcaacctccgcctcttgggttcaagtgattctcttgcctcagcctcccgagtagctgagattacaggtgcctgccaccgtgcctgcctaattttttgtatttttagtagagacagggttttgtcacgttggccaggctggtctcaaactcttgaccccaggtgatccaatcacctcagcctcccaaagtgctgggattaccggcatgagccaccatgcccggccccattttaactgttttaaagtgtacagttcagtggtattaggtacaaccatcaccactatctacttccagaacttcttcatcatcccaaaaggaaagcccatacctgttagcagtcacttgccccagcctctgcaaccgcgaatttgctttgtgtctctatggatttacctactctggatatttcatagaaatggcgtcgtaccgaatgtggcctttcatctccggctcccttcacctagcatgatgttttcacgggccatcggtgtcccagcatgagtcattccttcttattttattatgccacctgaagtctgagacccaccccgccagctttcagcagctggtttctttctgggcagtgcggccgggagcttgagagtgcaaagtgcactagactctggagtcccatgacttggatgttaactctgggccggttacatcatctctgtaagcctcactttgcttatccgtaaaatgagcattataacagcccctccctcacagggctatttgcaaagtggctgctgtgtggtaagagttcagtaacagctttcatgttattccatgttgtgagagattgagagatgctagaattcgtccaactatgtcctattgttggacattcttttctgttttttgtttttttttccgacattttgctctgtcgcccaggctggagtgcaatggtgtgatctcgcctcactgcaaactccgcctcctgggttcaaatgattctcctgcctcagcctcctgagtaggtgggattacaggcgcccacgaccacgcccggctaatttttgtatttttagtagagacagcatttcgtcatgttggccaggctggtcttgaactcctgacctcaggtgatctgcccgcctcggcctcccaaagcgttgggattacaggcgtgagccaccgcgcccgacctacttttctgttttttcaacaatgctgagtgatatgatttggctctgtgtccctacccaaatctcaccttgaattttaatccccataacccccacttgtcaaaggggggaccaggtggaggaaattgaatcatggtgaacccccatgctgttctcatgataatgagtgagttctcaggaggtctgaaggttttattttatttatttatttatttatttaaagatggagtcttgcttgttgtcgcccaggctggagtgcaatggcgccatcttggctcaccaggacaacagaatgagactctgtctcaagaaaaaaaaaaagaataaaaccctggaagtggaattggtgggtcaaaattttatttgtattatgaaat[137 bp omitted]ccatctctactaaaaatacaaaaaaatgagccaggcatggtggtgggcacctataatccctgctacttgggaggctgaggcagagaattggttgaacccgggaggcggaggttgcagtgagccgagatcacgccactgcactctagtctgggcgacagagtgagactccgtctctaagaaaacaaaaacaaacaaacaaa[132 bp omitted]aaccccgtctctactgaaaaaaaaaaaaatacaaaaaaattagccgggcgtggtggcaggagcctgtaatcccagctactcgggagggtgaggcaggagaatggcgtgaacccgggagacagagcttgcagtgagcggagattgtgccactgcactccagcccgggcgacagagcgaggctccatctcaaaaagaaaaaaaaaagaaaaaaaaggaacagacagtaaatataatgaactgatgaactcatgtcagt[136 bp omitted]agtgaaaccccatttctactaaaaatacaaaaaattagctgggcgtggt[132 bp omitted]tcaagataaaaaaaagaaagaaaagaaaaagaaagaaggaaggaaggaaagaaagggaaagaaagaaagaaaagaaagaaagaaatgcagttttgttacaggtgtagttaaaaaaaatagagataaaaagaaaaatataatgaactcatggattccaccacagggcttaaacaaaatttccaaataccaatgtcccgtgtagctttcccgattgcattcttccctccccaccctcaggggcggccgcttccctccccatgctgtgttagtcatgcccttcacgtgtgtatccttttgccacatgtatccacatgcaaccattgttttgttttgctttgttttttgagatggaatttcgctcttgtcatccaggctggagtgtagtggtgcaatctcggctcactgcaacctctgcctcctgggttcaagcaattctcctgcctca[219 bp omitted]gtagacttctgcaactacgggttgtcccgggtgatatatgggacactggtgcatctactttcactgacatatggtgttcccctgtatcaatataccaggatccatgtttccattcttctggtgatggaaaccgtttccagttcctcaccgttacaaacacgatagcgagcattcttgcatttatctctttattccaagtcggagagtttctctagagtgtacacccacccactagtagaaggactgtacttcatacagactgatacaacttttccagttagctgagtttccatgaagtcctttatgcttgccatttccccctccctgggtaaggctgcttttctcttctggagctggtcacctgtccctccccactgatgaccaggagttacagttggcatcaccttgctctggtatggccacctctgtccacctctgtctcctctagctgctccatggcaagtccccagccccagttcccttctgccggcatggtcctggtcaaagtgatggtcccgagaaaggtttggtcgactttagctgtagtggtgcctgcctgagttagggggtatttcagagctcatgagagattagggaggtaaagcatggggctaggggatagtccctgttggagaagaaatagcatgaacaaagggtggaaagctggaagccaaacaagtgtatggtctatgttttatagatgggaacccaaagcccagagatggcaagtcacttcctcaaagtcacagagcaatgcagagactgtcagcttcatccttattggttggtcattcacacattcattcagtacatattaacaaagtgcctaggccagccatggtggctcacacctgtaatcccagcactttgggaggctgaggtgggtggatcacctgaggtcaggagttcaagaccagcttggccagcatggcgaaaccccacctctactaaaaatacagaaactagctgggcatggtggtgggcacctgtaatcccagctactcaggaggctgaggcaggagaatcacttgaattcgggaggcagagagccgagatcgcaccactgtactccagcctgggcgacagagcaagaccctctctcaaaaaaaaaaaaaaagaagggagcatcacttgaatgagcccctagagagaccctgtctctacaaaaattaaaggattagccgagcatggtggcatgcgtctgtggtcccagctactcaggaggctgaggctgtaggatcgcttgaacccaggaggtcgaggctgcagtgagccatccttgcaccactgcactccagcctgggcaacagaggaagaccctgtctcaaaacacaatacaggccaggcatggtggctcatgcctgtaatcccagcactttgggaggctgaggtgggtggatcacctgaggtcaggagttcgagaccagcctgaccaacatggtgaaaccccgtatctactaaaaaaaaaaaaaaaaaaaaaaattagccgggcatggtagtgcatgcctgtaatcccaactatttgggaggctgaagcaggaaaatcgcttgaacctgggcggcggaggttgcagtgagccgacatcgcaccattccactccagcctgggcaacaagagggaactctgtctaaaaaaaaattagccaggggtggtagtgcatgcctgtaatcccagctacttgggaggctgaggcaggagaatcgtttgaacctgggaagcagaggctgcagtgagccgagatcactccactgcactctagcctgggcgagagagcgatactctgtctctgtctctctctctctctctctctctctctctctctctctctctctctctctctcacacacacacacacacacacacacacacacaccaaaacaccaaaaacagcacaccaaaacagcacctactctgtggcatgcattgttttaagtgcccacgatctatagctgtacagtggagcgcatgtctgacagtgatcctatatgtgtagacacacaagcgcctacattgtgttaccggacagtaacatgctgcacagctgtgtggcccaggagccgccggccaccttacagcccaggtgccagcagccctgccacgtaggtgtgagtgatgttgctctaggatgctggcaggatgacgacatcgcctgagcacgcactgcccagatggtatcagtgtcgttaagggaagaatggctgtggcgaaacaaacaaacaagcaaacaaagaccgcctgttctgagtgtggagcttattattctcggcgtaattatgatgaattgttagttacgtttgcctctaggattgaggtagggggggtgatcccaattagggggtgccccaggggagcgccccaggagtcagggcttgtctcaaaagtccccactcctccctcagcctcccctccctccatccgaccccgttcatatcgcgggaaggtcccacagagtgcgtgtggatactcccaaaacgcaacggtgtaaacggggagggagggagagagactgaggagccctttgtagccaggcagagctgtcaataaagtttcgtcgccttggtaaccgcaggcctcgcggggcgggaggggagagggatggcggtgcgcgcgcattcaccgcctccctcccgccgggtctggctttctccctcctgtggccgaagctttcctcggagaaatagaagagggaggccgcgactctatggtgatggacggaggccttacccaatggaaagaggagctgtcccaaggccaggcaatcatatacgactactggagctggcagagcccgccctctttccacttggacctgaataacccgacccaaaccgagtttcgcccggagagactgcgctttcggccaatgagtgcgtcgatttcgagccccagtgtgagcgaaggcgggacaagtctccatggcagcgactaaaggacagcgatgtgaaccactgacaacagttcgcggcgtttgacggcggcgggggcgtggcggggttttatctgtgtattgacgagagccgggcgcggagggaaagagtggggcttggccaatgggagcgccgtgagcttcgtagcaacggaggagtggcggtggctgtggccaatagaaagcctcagtggccttggcggggctggcccggagagcagatgggaggtgcggcgacagtgtttgacgagagccgaaggaggctgtgggaggtgttggcggcggcggcgcgggcgcctgaggaggaggaggagaagcgggtgaggggcggcgcggggcccgatctctgagccccttcacggccccagccccgcgccgccttggctccccagtcgccccctgccccgactgccccccaccccgcccggcccctcctcgtgtccaggcgcccacgtctcccggcccctcgccgggcctcgggctccgcggcactgcagcctccttcctgtgcttcctcacccgggccctgacccccttcttacgtccacggccctccctgcatcctcagggcctctccctgacctcttgtcactctccaggcctctccctgcaccccccagggcctttccctgacctcaccctccaggcctctccctgcacccccaggtctctccctgcaccctcagggcctctccctgacccttctctcacccccgggacctccctgcactcccagggccaatccccgacctcctctcaccctccaggcctccttctggaccctctaggtctttctgtgccctagaacctctccctgacccctctgtccctctcctggcactccctggaccctgaggtcggcctctgaccctccaggtcccttgccctgggctctcaccgcctacccaggcgcctccctgggtccccaggcccttccctagggtctccctttcctggatcccccaggaccccaccaagcccgtttggatccctgggcccctgtccgccctctcaggcccttcactcactggacacccaggatcttctccgccatccctggaccgccccccgacccaggtctcccgtctggctcctccctgagtccctaggccattccccgctctctgtcctccctggcacccccatcccttcctcacacccctctgagcgcccccaggcccggctgcagccttctccctcccacagccccctgccgtgcccaccgctgtgcgtttctctccttgcccccagccccctctccagcttccccgctgtccctggcgtcctcctgcagcgccccctctttctctcccgcagcctcgcagtctgtccccgacccctccacagccgtctctgcagctcccgctccttgccctgccccatctcctcctctcctgggcgcggatgagcctcgagcgccgtggtgcggggacgaggctggccctccgtccgggttaggggtttgggtggttttcttcatctctccgttctctcctggctccgctttaaaaaaatgtttttgtaaatattgacctgtgctgcctccccatagtcttcctttgctcccctccccacccccgcttttgtcctctgagcccccctcccctggaatccttggagagggagcaggtgctgggatccctcccctgccctccctcccgtcacccgcctccaggctgcctggggcttcacccggagcctcctgaccactcccgaaggctgccggggaggcagggggcggagaccgaggctgggtcgaggtgggggtggagggcgggacctcgggctggcgggaagctttgacttttcctccttgagggctagaggtgaagcggctccccacggtgctaagcctttagggtgatcccggctgccaatcagtcagccttctctgggcccaaagagatgtgtgtgtgtagggggtctctgtacatatgggcaggggcatctgcgtgtgtcagtctgagtgtgcatgggtgtgcatgtgggggttgtgtgtttaggggggatctgtgtctgcgctgcggagcaagagcaagagctaaggcgatggctgacatggctctgggctttccctactctcagaagtacttgttgcattccatcttcgccagcggcctggtgaagtcagcactgcttttctccccattttgcagatgagatcgtggggctcaccagcgtcccccatggcttctgagtagcgtgggagtggagtcagcaccaagccaggctccccgcgcctgccttgccctcacctgctcctgctctctgccagaggcagcatggtccgcagggcaccatggggcccgacagagtgacagcacgagaactgtgcgagaacgacgacctggccaccagcctcgtcctggacccctacctcggtttccgcacccataagatgaacgtcaggtgaggtggcctgggggcgagggtgggcccgaggggtcaggacccctccccttgcaccgctgccgcccctcggccctctccttagcctggtcctcccctcagctccaagtgggggttggggccggggcccgggaaggccctgggacccaggcatgccctctcccccagccctgtgccccccctgcggcgacagcagcacctgcgctcagcgctggaaactttcctgaggcagcgggacctggaggctgcgtaccgggccctgacgctgggaggctggacggcccgctacttccagagccggggcccgcggcaggaggctgccctcaagacccacgtgagggcgccctcccctcccccgccctcaccgcgtgtcctccccgctcaccgggcctggtcccgcctggcagacgctctagagtccctcagcgcagcccctggggccccctgacttcctagcccttgggaccatctgaggcaaggctcagagaatcctaggagaggagagttgggggggccctctgagatgtagtccaacctcttcatttgacggatgaggaaactgaggccccgagagggaacatgaggcccccaagaccacacagtgagtcagtggcatggcaggcctagagtcctggagagagagggccaaagatgcccctgccccgcctcctcacccccaccctcaccctcaccaggtctatcgctacctccgtgccttcctgccggaaagtggctttaccatcctgccctgcacgcgctactccatggagaccaacggggccaagatcgtgtccactcgtgcttggtaagagggcaggactccctgcaggtatccttggaggagacagagctcagaggggacaagagagaccctctgttcatggactggccaaccggggaaaagcgaggggcctggtcctccgggcatcctaggaaggtggtggggctaatcccggaagacctttgtggctaccgtggtgccgctggagcaggagaccccggatgtgaccccagggttcctggggcttccaggaaagaactaggcttctggtcagggccgtgctgtccttacctccttgtgacctgagcccccaccacatgttaaacacccctgagtgcaatgaggagcccctgcccctgcccctgcggggttcacagtctggtgaggaggtggggggcagacaagtcaacatgcagtcactggtcccagctggtacatgctgcaggggagctgtgaggaatgagcaagtgctcccagggcgaggctcacactgacaggggaagcacccgcctgagggtctggtggggcgagtagggggtagtccaggcaggagggatttgggggcaggaggtgctatgagagcgaggggagagaatgggggctgtatctgctgtgtgcgtgctgccctgaaggctttcagtagaagggtcctgtggggctgtgggctggagcagggaagcccacccaggcaggaggggaagagggagatctggaagatggatcgccaatagccagcaccagcgcccaggagtccctccttcctgggtgcctctgtgccggaggcccgagtcccctgaacacctgcaggaggccaggcatcgcccacagccctgccccctggcctcttggcaggaaaaagaatgagaagctggagctgctggtgggctgcattgcagagctgcgggaggcagatgaggggctgctgagggccggtgagaatgacttcagcatcatgtactcaacccgcaagcggagtgctcagctgtggctgggcccagccgccttcatcaaccatggtgagggtcaggcaggtggatgggcaggacgggatagagccaggcagggctggaggggtgtagtgggagggttctgcgactgagctgccgagctcatctacctctcttctctctcctgccccaactggctccagactgcaaacccaactgcaaggtaaggccttgggactcgggaggagagggcacgcaggaagaaagggtgcctgtggcctggggaaa[132 bp omitted]tactaaaaacacaaaaaattagtcgggcgtggtggcgggcgcctgtagtctcagctacttgggaggctgaggcaggagaatggtgtgaacccgggag[138 bp omitted]ggcagagtgggtatttgctcacaaggctaccagaaaggaggaaggggttccagtttggccagcgttgcccggctgtttgtgcagttgcactggaaccctggttgccagctgctggccatctttcttctctgaaaaccgagctgggagctgtgccaatttgggcagggagtgtggcagggaggcagggccctgtggtgggagcccccggccttgcagggaacaacgcaggcagctgtggtggcaggagcagggaggccagagagccccaggggccaggactcaggatgctgtccagacatgcccaggagaggccgctggttgtcctgtagcccggaagcagaaggaatcaggagggttggctccagggcggcattgagggtgcaccctctggagcacagacctcgatggggcaccccgggaggcatgacaaagggatccagatttttggctccagagtcagaactgagttggggtcctggcgatgccacccctggcctttggtttttcatctcagatggggttggtgaggatctctggaactctgcgggctggtcaagtgtgccggagggttttggacagcgaatgcgtggccctggtctgacaccacacacagacgctgggggggatggaaacaaaaggcggcattcggagaggctctgcagggccagtgtgctccagccaccttgagcacacgagagggcggccagctctccagcgatctagaaccatctggcttcacagaagccatgctgggcatcgacggaggagtagaatttccctaggtgttaaaggaaatcaggggcaaaggggggcgtctagcaggacacggcacaccagagggctgggggtgcccagcgacggctttgatccggcagcaaggccttggggtccgggccagggagccatggaagctccccccagggtgtataatgggaagcttggtttttaggtcaccctggaggcccatgtgcaggaggcttggcaggaaggggagaggctgtaggcagggtggccacaaagaggtgatgaggggctgactccagtaggggtctcggggaggcgaggaggatgaggatgcgggaggtggcacactcagaaggcagtggccggttggtctgggggccgtcaggcaggcaggtggcgagggctactcccaggcaaatgtcaggcttgagtggatgggtagatggacagttgggtggacagtggtcatgccccctcctagacggggaacagggaggaaggcgcagctgtgtggggcttaggaggagcctgtggggcagctcctgggtgaatgatcccaaaggcagggccagagcacacacagattgggctgtggagtgaggcaggcctcagagaagcgggggcggcccgcagcaggcagagctcggacctcagctgccaaggcacagtctggcggggggcaggcagctcaggaggggatgggcttgggtgtggcagaggaggtggggcttggcacggggccacagaggctggagggagtggtcaccactgctggcactgcacgctgccagaaggtcaggttagatcatcgtcctgcagggaggggtggaaaccagccagtgggtggattgtccaggggctacaggcaaaggacaggccctcggcaaggcagccgcctcggaatgccacttttaggggctcagctgttgccccattccaggagaggacgctccgggccagggtgcccggccaggtgtggggagtgggtgagccctcccctgtgccctgggccagggcgctgagtgggcttggccctcagtttgtgcctgcagatgggaacgcagcctgcgtgaaggtgctccgggacattgagcctggggacgaggtgacatgcttctacggcgagggcttcttcggcgagaagaatgagcactgtgaatgccacacctgtgagaggtgggaccgggcgagaggcggctgggttcgggtcgtctgggcttcttgagcccagaaacgcaccctcgggacccatccctgagtgtgtccaaccccagcctctcatctcccttccacccggcctcatctccccttcacccggtctcccaggaaaggtgaaggagctttccgaaccaggcctagggagcccgcgttgccaccacggcccctggacaagtaccagctgcgtgagaccaagcggcggctgcagcaaggcctggacagtggcagccgacagggcctgctgggccctcgggcctgcgtgcacccatccccgctgcgccgggacccattctgcggtgagcacccctccctgccatcccagcagcccctcccctgtctgctcctggtcatctgtctcctttcttctgagctctctgcctagcctggaaccctccctcccaccctcagtcgctggcaggcctcgctgttgagcagttcggccgcatcattcctctggggagcgcagggcagggctgcctccttgtccagaggaggaccggcccagcttgcactgacttcacctctcctttgttcctcctctccctgccacctgggccttcacagccgcctgccagcccctgcgcctgccagcctgcagcgcccgcccagacacctcacccctctggctccagtggctgcctcagccccagccccgagtgcggccccggaagcgccgacgcccccggccccggagggccccagtgctctccacccaccacgctgcccgcgtctccctgcaccgatggggaggctgtggcccccactgccgcctgcgaggagaggccctggtggccctgggccagcccccccacgcccgctgggcccctcagcaggactggcactgggcccggcgctatgggctgccttacgtggtgcgtgtggaccttcgtcgcctggccccagccccaccagctaccccagcccctgctgggaccccaggccccatcctgatcccgaagcaggccctcgccttcgcccccttctccccacccaagcgcctacggctggtggtcagccacggctccatcgacctggatgtcggcggtgaagagctgtgacaggccggacggggaggcccagcagggagagagggtctctctcctagctgctacccaggacctccagaaggagcccttggacctctgggagggagctgacccttgactccagcatagctctgaccctggaatggggttggtttggacacccccagggatctgagccctgaccctttgtgactgctgacccctgagccacccccactcccacagggagccccggccatttgctgccctccccacccctgccccagcctcaggactgcaggagccatccgcccccctcagccccttcctccccagggagcaaagccataaggggcaggggccaccccacggcatctccccagaagtacaggcctcaggaggaggtggaactgatgtagggggtggcactccccagagactgccctcacgaggggactgggttcgctctcagctctgcagctgtctgcggtggggggaaggttggggggtgtctggaggcatgttcccctcaccaccccccgtgggtctcagggaggccgggtgtgacctcatctttctcatggtgctatcctggtgctattggggtggggagctccctcccctcccccacaccagaaaggggtatgttgggggcttggaagcacttgaactttttattttattaaaaccttgttataagcagcacccttggcggttttttgttttggcttatgttttgaagggatgtgaggagggtgagaccctcagctgtgctgatgagagggggaggaggcaacacaggccttcagccctgagagctgtcgggagagggatttgggagcgtgatggactaggggactgaggctggagccccatccccactcaggctgtgcttgtaaaaatgccttgagacccatactctcctaggagtgggtcctcccattttccaggcgaggtcaacatcgtttagcaagcagagtgacttgccaaggccacgtggggacttgagggcccttctcccttctcgcgcttctcaatgagatgcccctcccacatctcactccaaacggagagagactgctgggggcctggctgagtgagggtgtgggggctgcccaggacaccagagccgagcctgggggaggcggcgctgacaggaccttcctcagctgtggcatcttgggctttgccgtgtgtgagaccaggaagatgaatcttgtttcttcaggtccgctccaggatctggattttgccagggcgtcttagctctgcctgctgtctcgttttgcaaaaggaaataacagcggctgactgtgagcaatccctgatcccaggtacctccagcttctcccagatacttttctcactgggccaccgagcccgtctcacttgggcagctacaggtcacctgctggctccaggccccccatgtgcgcctccgcatctgccagccttgaacaagcttactgtggaggtggacgaggccaggctgcaggtatcaggaagctctccttggccctggtggagagggagcaacaggggagcagtggccacagcgagacccatatgagcacctcagcggtggccctgggaggcggggacaagggggcagttgagaacgggtcaaaccttgtttactttaaaactcattagatacgttggataatatggcctgttctatttcttttgcagggagaaaattcctcttataatgcaaatcctgctaagccctgtttgttttctttctcatgttaaaaataaggacggagagagctccaggccatcaaacagcagagagatggctccactgctagtccccaaggatttgtctctgagtgaactgaagccatgctgttcgtttctttccttttttttttttttttttttttgagacagggtctgtggcccaggctggagtgcagtggcgccatctcggctcactgcaacctccacctcctggattgaagcaattctcctgcctcagcctcctgagtagctgggaccataggcacacgccaccccgtcaaactaattttaaaatctttttgtagcaattgtgtctcactgtgttgctaaggctagtctcgaactcctgagctcaagcgatcctcctgcctctgcctcccaaagtgctaggatgacaggtgtgagccaccgcgcccggccttttgtttctgaaattcaggtgctgttgccacagctcttagacaaagagggcagcggagcagggagtctcagctgaggactcatgggtggacattggaatttccaggaaccttctgaaatcttttaaatgttgagagtatatatttacatgcacattttttatagggggttcagagcgttcatcacattctcacaagtttctgtatccgcctctcctctgcccc[136 bp omitted]cacggagaaaccccgtctctactaaaaatacaaaataagctgggcgtggtggtgcatgcctgtaatcccagctactcgggaggctgaggcaggagaatcacttgaacccgggaggcagaggttgcagtgagctgagatcgcatcattgtactccagcctgggtgacaggagcgaaactctgtctcaaaaaaaataaaaataaaaataaaaatggtgagggcgttagaaactggcgatcagggtttcctggcctccgcactgctgccatgctgagctggtgtttctaggcagggcctgtcccatgcattgcaggatgttgagcggcttctctggtctccacccactcgatgccaggagcatgcctctgccccaaccaaaaatgtctccagaccttgcctgatgtccccatggcggccaaagtcagcttctggcttgagctgggcagcaccgggtggtgggggaggggagacaccaggcccatagtgaccgaccattccctgtccttgtcgcagcatggagggtcaggacagccttagggacgtgggcgctctcagtcatctcgcccatacagacaggagctggctggggagggcaggtgtgtctgcttggcgtccctcagctgcaggggaccctggcttccacgaagttggaggcgttcatgctggcacttcccagctggcaggacctgggggacatcctggtggagcaggggcctggggtcatgagttcaccaaggtagctcaaggacaggaagaaacggtggtggcagagggtcctctggtcgaagcctgggcctgagaaccccatcatacacgtggagaccagagcaagggaaacaaggaactcgaaggctggtggctgtaggtgaaggtggaaagaagtttagtgaaacaggaaatacaaccagcactgacctgggtgtgtggcactagaactgctctcagcctttggcaggcaggcagggccctggccaaggactccccaccctgaccccgtgtctccctgtgggggcactctggccctttatgctgcaagctagtaaccagatgcctccaagagctccaggactggtttatggggtcatccctgggctgtctgtccggtcaatcagtctcactgtccagcacaatatggggcaccagaactgggccgacatgctgattcgagtgactcagattgtctctatggctagagaccccacacactgtgaagaggggggccagacactgttctaactgctttatatgttttcacatcgccgtcctccccacaaccctaggaagtgaggtgtcattattatgtcattgttaccatatttcagatgaaaaggccacagcgcagaggggctagggaacttgtcccaggccacatggttagtagcttcagggcctagattgaactcattctcagaaccattcgggctctgccaccttcaggatgggaaagggggaaacccagagagaggaggcgaagctgcggcccctaggagccaggggacagtgagcaggggaggcagcgcaggtggccttcaggatccgtggtctggaggccgggaggacggagcaggttctgagggaagaaccgcagagggaggggaaagtggatgatggaaggattgaagagatggggctggaggaggagaaagaagaggaaaaggagtagagaaagaaggcgggaggaggatgttgagcgaacaaggatgcaggtgttctgggtgggggcaggaataagtagagtggccttggttttctctgacctgggaggttgctgagactgtgaggctggcattaggggtctcaggaggcggctactggacaccagggaaagccagccagagcacctggaggaggtgttcggagtttgcacaggtgatggtccaccaggctggaggccaggccgggcaggtctgcccctgcccctggctcaggcatcagtggggcagtggcggctgcagagggggtcgggagtgtgagaatgtgctgagatgaggtctggaggcagtgaagataggatgatgggaggaggaggaaggaggaaggctggccaacagggcaaaaatgggttctagacacggctctggggaggtcaggaggctgctgtggctgcacaggtgtggcaccctgtgcttgggatgttacctgggtgacctcaccaacttagctccattctgtgactcagagaggggtcctgcccccgtggttctgccagcgcctctgtgcattcgtcaaggctctggggacgttgcatgaacaggaagccctcctgtagttgagtccacaccctgtgccctcaccccattcttgggttgtggtcagagacggagccaggagaccaagatctcagaggtggcgtcatcctgggggatggctcatctagggtgtgtcctgggcagcatggagggcaggtgatggacaggtcatcatggggcagggagcaggatggagtcagccccctgagctcacccagccctacctcctctgataatggggccctgagccatcttggtttgccttggggaacctcgggctcacacaggtcaagaagcttgtctagggtcaccctgcaagttgtcatgattagttgtagtcacctttgaaccctggggttgaacagggcctcataggaccgcttcagtcagaggatggggcttccccctcctaggagcccctctggaaggctgatagctcagggagtacccgttgggaaaaccagcaccccaggctgactggtctcacggctccctcagcaggaccaggctggaaccctagggctttgtcaagcggcactccttggcctggggagaggcaagacttcaaagggcgtctggaaccggaatgcggttccgtgttactgccgggatggggaaggagtaaagaatgattccgagggagctctgagcgtcctctgggtgctggcagtctggcgggggtcacaggagaaattgcggcgatgtgtgcggtgggagagactgacagcggcctctgcggggtgggggtgcggggtgagcctgatgcattggagaactgagcaggctgctacgcctggctgtgggtgcgggtgccgaaagcgtggacaccaggggattctgttggaaataagctggctcacatgatggggatctcgatgttctgggaggggaaatgagccaggtgggagcggggtcgtgatggagagtggtggagagcccagagagtgggggaggaagggatggagtcagcgctgggtggtacaaagaagacccctcaggacccgagatgggatggatcaggggtgggatggggaaggagcctggggagatggtccaggcaggaggggagtagggaaaggactgaggtgagaggtaggtgtggtgattggaggcaggagcaccttggagccatctgggtgggacagtgttgagaactggggaccctgggctggctcgtagctgtcaacgcgaggcatctacctgctggaatggagagggagaagggggacgggaggcattcggcttcctgtcttagggccttgactgcctgctgctacctgatggagcagcagtcccccacctgccccttatcggaaaaagcagcgttagcccggacacaggcacacggaggatccccaccaccaccacgacgcatcgctggctgggcattaagaagaaacatcagcaacagcataccattattcgtggcttagacactgggaggtaggggtggataaccgagacccggggctccgcgagacaaaaagatgcaggatcactgcatcttcagaggaagccgcgctggggcagtcagattttgccggcgaaaatcccgttcttgatctgctcgttccagctctccacctgggaagcagaaaggcagggagcgggacgccggctcagcctcggccgagccctgcacacgcctggcccggcgccccctctgccgactcacccagctgatggggcacagcgagtggtacacgcggaaatagtactcgcagggctgcgtgctcttcccgcggcgggtcctggtcttgaggcagcggtggtagtctgtggcgggcgggggtcacgcggcaagccacgcccattccaggacaggacccgcccctccactgctcgggccctcccagttcttcgctgcttcgtcccgcctccctctcccctggaggcctccgtcccgcccctcccagccaggccccgacccctacctccctcacactgctcctcctacccagaccctgcccctacctacctcgccccgcaccttcacgactcggccccgcaccttccagatcaggcctcgcccctaccaacctcgccccgcccctccaggctcagccccgccttttctcgaccaggccccgcccccaccaacccggccccgcccggcctcccaccctaacggtctccgcgggacttagggtgggagtgcccctccctgccgtcccttgtcacaccctgctcctcccataacctggctgagcaggtctcacccaggaagttctggtagcagttacggatctggttctggctggggaagcgcgggtcgaagggcggcgtcgaccatttccccttggggggctcctgggcttccacatccaacatccacgaaggaggcaactcctgcgagacgggacgggacggggactccgtggggccgagggggcgccctcgctccgacccgtctccccatcctgacccccgcccctgaaccccacccgtcgtgccctcaccagcctgacgttggcggccactggatctgctgtgggatggtcccggggtgccgctcgcttctgagtccgcggggtgcggtcccacccgggtcaggagaaacgcaccccgcggccggattggctaggacgcccgagccccagccaatgggagccgtcgtgcaccgcggggctggtaggggcgcccccaccccaccccttgctcccccgacgccccctcgggggcctgcgcgtgcacacaggcaccgaggtgcgactcgctgagtctcaggctcaagctttaatctctgcgaagttgggcggctccacgggctcgcccccgcccccccccgccccccaatatataaaggcatatccatagttctggtatctaccagagggggcaaatccccccaagcggctttcaacattccgcttcctacagtcggtgcgcacagaaccctcggggcctgtggggttaagaggaaagagcagcggtggggtccgggctcctgggaacccccccgcccccctcgtcctcccccctccgttacccgccccccccaccctcctccctcgcccccctccccccgcccccaggtctaaggcagatctccagggtcttaaagggtacctggcagcgctgggctcctctggacagtttccaactgaggttaagcccccgcatccggccactcggagtgctgggagtgctgcaggctgcagggagaaagcaagccagagagagctttgggggacagggtagggagagaggggtacccagggctttaagagctgcagatgcctggcttaggagagcgtcccccagggcgggtcttgctgtgtgtttggctcactgttgtatctgcctggggcagagtctggcagtagtaaatgcacaataaatccgaggcggaatcaatgagtcttggctctaggggcagacaagtaactggaatctgggcaggtggtttcacctctagatccctgctaagcttctctccctcctgcctggttaatatcaggcctgactcaggattgtttacactgacagccaaatgtacgaattaagaatcccggccaggtgcggtggctcatgcctgtaatcctagcattttgtggggcagaggcgggaggattgcttgagtccaggagtctgagactagcctggacaacatggtgaaaccccatctctacaaaaaataccaaaattagccaggcgtgttggtgcgtgcctgtggttccagctactgaggaggctgaggcaggagaatcacctgagcctgggtagcttgaggctgcagtgagctgtgatggcatcactgcacttcagtctgggcaacatgtgagacctcttttctacaaaaaaatcaaaaacttggctgggcttttggaggctgaggcaggaggatcacttgagcccaggaagataaaggctgccatgagccacgatcacaccgctgcactctagcctggcaatagagctcacccctgtaatcccagcactttgggaagccggatggatcacctgaggtcaggagtttgagactagcctggccaacatggcgaaaccccatctctaaaaaaaaaaaagaaaagaaaagaaacagggtgtcactctattgcccaggctgcagtgcagtggcacgatggtgggtcactgcagcctcgacttcccagttcaaccagtcctcacatctcagcctccagagtagctgggaccacaggcacatggcaccatgcctagttaactttttttttttttgagacggagtctcgctctgttgcccaggctggagtgcagtggcacgatctcagctcactgcaacccgtcgccatgcccggctaatttttgtatatttagtagagatggggttt[131 bp omitted]actcttttgcccaaacttgtcaccattttttaatgtaccccttaaagtggcattcggcacattcacaatgtcatgcaaccacctctacctagttccagggcatttgtatcacccacaaagaaacctccaacctggctgggcacggtggctcacgtctgtaatcccaacacttttgggaggccgaggtgggcagatcacctgaggtcaggagttcgagaccagcctggccaacatggtgaaactccgtctccactaaaaatacaaaaatcagccgggcgtggtggtgagcacctataatcccagctactcggctcctcaagaggctgacaggagaattgcttgaacccaggaggcagaggttgcagtgagctgagatcgcgccactgcactctagcctgggcgacagagcaagactccgtcagaaaagagaagaggaagggaggggagaggacctccaacccatgagtagtcactcccgcttcctccacactagacccctggcctccaacgattcactttctgtctctacgggtcagcctgttatggacatttcatggaaatggggtctttgtggccttttctgtcctccaggtgcccactcttgcccccctacatcctccatgccccagccagaggcagcctcttcacacataaatccgtctccatcattcttctgctccaaaccctccagctcgctcagagtcagagccaaagtccctaaaattgtctgcaaagtcctccatgatgggcgcccccctgctgcacctctgaccgcatttcccaccccgggatccccgtggtccagcacattacaaacactcctgcctcagggactgcagtggctgttccttccgctgggatgctttccccccagatgtcctcatggcttcctccgtcctctcctccaggtcttgacacaaacaaccccagctccgtgagggctccctagagcacctgggctgtggtgggggctgtcctgtgcactgtaggttgctcagcagcatccctggtctctacctgctagaagccaggagcacatcccaccaccaccagccccatggtcggacactgtatccccactgcctagaacaatgcct[154 bp omitted]tctactaaaaatacaaaaattagctgggcgtggtggcacacgcctgtaatcccagctactcaggatgctgaggcaggagaattgcttgaacccaggaggcggaggttgcagtgagccaagatcataccaccgcactccagcctgggtgacagagtgagaccctgtcaaaaaaaaaaaaaaaagtgaaaggaaagagtgatcatctctgtctcataaacagcagagctcacagtaaataatagctgctaacccccgctacctgggcagaaggttcaagacgcccgattcctcctgtatctcctctgccttggtggccgtgttcctcacagtttcaagttctaagagcatgggcaaaagaatttctgaagacgaccccacagtggccagggggtgctgggctggcatcctcatgggctcctgcgacaccctcttgggctgctgggacgccctggctgtggcctccatctttgagatgagggtctccgagaggggcgatggccgtaagtcctcccacggtgaggcggtcagggggataggcgcctgggagattccttccctcttcagactggcagaggtgggcttggagcgaaagggcaccttgggtggccccttggggtcccagggtggctccttcatctcgccccatggctgctccttcatctcgccccatggccgcttgccctccttcacccaggtgtgcgactctggctgctctctgaccaccactggcttcccctccagtaaggacagctggccggggcgggagggcactgaagccatcattgacgtggccgacgcctgcggagtcgccaagagccaggagggaagtgagaccaaagcggatttcgagggctgctctttggagttggccgtgatcatgagcttggtgagggtgagcgcttccacagagaagggcctgctgtgctcctgggaggggccctcgacggccagttccttggccttgacccatctcttccgctgctccaactccttggatctcacgccaggcaggtccggggacctctcttcaagcttcgcccagtgggcccagtcctccaacttcccctggcccctgaaggcctccagggtcacctccttggtttggctaatcaggatgtccttggactccttcttggtcacggtgaagggcgactccggggacttggcctgagtcgtcatctccaccacgtctgtctcctgggtgcgcaccgtcaccaccggctccggtttccctccagactggcttctctccagcacggctcttccaggaattcctgttggcaacacgtcaaaatcgccagggagcttcccccgtgaggcaggcgggctcagcgccatctggtattcggtaggtgaggttggcagagccttctgggatggggcagggaggagtagagatttcttctttggagcagtgggggacacagccttctggggaatggtaggtacagatggggccttctgagatgggggtggggtcttctggggtggggcaggtacggctgaggcctttcggggagaagctgacgcagctgaggccttccgggatggagcaggtatggctggggccttctgggatggagcaggtacggctggggccttctgggatggagcaggtacagctggggccttccggggaggagctgacgcagctggggccttctggggaggagccaatccaggtgggggtttccacgatgaagcaggtacagctgggagcttctgggactggtcaacaaggaacggtgccttacaagatgtgacaaggccagatggggccttctggcagggtggtggccccggcccctggtgggagcccataggcccggccttttccctgcccctggggatggaagagtagggtgtggagaggcaggcagccgggggatagggagccagaccggaggcagcagacgacaaagtgctgcccccagagtccatgaggtcttccgtgtcctgatgccacaggcacgggtccagggagctgcaggagcccagaaagaagccatcagggctgtcagctgagacacagtgtgaagggctctcaaccacatgtccctggcctgtggcttcatcagatgcagatgtgcaggcctgtaggtggacagaggggagaggatacatggtcaggatgcatggagaccccagacccgggagggcagacccctgctccctcctccctcagactcaggagtccaggccccagcccctcctccctcagactcaggagtccaggcccccagcccctcctccctcagacccaggagtccaggcccccagcccctcctccctcagactcaggagtccaggccccagctcctcctccctcagactcaggagtccaggcccccagcccctcctccctcagactcaggagtccaggccccagctcctcctccctcagactcaggagtccaggccccagctcctcctccctcagacccaggagtccagacccccagcccctcctccctcagactgaggagtccaggccccagtctctcctccctcagactcaggagtccaggccccagctcctcctccctcagactcaggagtccaggcccccagcccctcctccctcagatctaggagtccaggccccccacccctcctccctcagacacagaagtccaggccgcagttcctcctccctcagacccaggagtccaggccccccacccctcctccctcagacccaggagtccaggtcccagcctctcctccctcagacccaggagtccaggcctccagcccctcctccctcagctctggggcctgggccctgccccgggtataaggctggcctttggagaggactgtgtctggttggcggtgctggaaatgatgctgaagatggtccaggtggtgatgctggtcttctctggatgggggagccgtctgagccctttggggcaggaaccagagccacacactgtggcaaggggtggggtgggttgatcttaccaggcaagcggatttgggtgtgagttctgtcggggcgggggtctgagtgggacctgcaggagcaataccgtgggactttggtggcatctgggctggggtctcccaccttctcccacccacccaccggcaacaagaccccacgcccacttcttttctgcaggtttcttcctgacgtcagcatgctccagctgcgaccagatgaggggcacagagtcgcccacggcctgagacttgaaactgcgcttgagcgcctggagtgggtgaggaagggacggttagacaggggcagccccttgggcccacaccaccccgccggctcaccttggccttcctctgtctctgagcagccaccgtcttatgcggaaagttgcgctcagcaaccctgactgggaagagaggagacatcctgggtcagggaccccaggggagggcacgaggacctaccccaggagcttgtggagggccccaccaaggaagggggaagagccaaagggtgcagctctgtccctgcgacggggagaacccagaggtcctgacaaacagcagggcctgctcacctgcatgtctgctgatgggctggtcctgcagagatagagggaggcaggaggggcccgggcttccacatctccataacctacccagcgagaggcctaggccccctcctgctcccaggacctgacgatccagctcctcctgcctcagacccaggagtccaggcccccagccgctcctccgtcagacccaggagtccaggcccccagtccctcctccctcagacccaggagtccagggccccagcctctcctcccttgactcaggggtccaggcctcagttcctcctccctcagacccaggagtccccagcccctcctccctcagacccaggagttcagactgccagccctccaccctcagacccaggagtccagaccccacagcccctcctccctcagacccaggagtcccccagcccctcctccctcagacccaggagagttcagactgccagcccttcaccctcagacccaggagtccagggcccttagctcctccgtcagacccaggagtccaggcccccagtccctcctccctcagacccaggagtccagggcccttagctcctccctagacccaggagtccaggaccccaggcccttcttccctcgactcaggggtccaggcccccagctcctcctccctcagacccaggagtccaggcccccagcatctcctccctcgactcaggggtccaggcccccagcccctcctccctctactcaggggtccaggcccccggcctagactttgggctcttggtcgcagtcccctctggatctggccggagggttcctggggcctgccatgccctggtctgtggagctgggatcccacctgcaggtgccaggtggaggcaggcgcttcggccagcggcatatccaggggggccgtgcgcgtggtcctgggggtccaggtgggagccggctcctgaagcaggttgatgaggcggacccagcagtggaacaggaagcccacctcgttgtcaggggcgtccagggccaggtagtactggcggcccgagaccaggcgcagcttcaggcgccaggcagagaggtcatggacgcagaggtggacgaggtccagggggatcatcctgggagagggagaggggagcgtctagagcaggaggggtggagggggcggccgaggggttgggggatgcggcacctggtcagcacgaggccggagcagtccctgtcctcggcgggctggccgatcagcaagatgtcaggcaacaccaggcctggcagggaggcggccacgcccatggccagccggttggttctgtgattcacgaacactgggcccccttgatgggtcacctggggcagccagggagagggggctgggaccactccttcctccagcagccacagcctgagcctccctcctgatcgtcccccacacagtgactgctaaatcccgttccctctcaagatcccccagcacggggggccttgcttcccctctgtccctctcagccccggggcactgggaactggagacctgaacaaagttactctcgaacatgggcagcggacggaggggcaggtactcgcccttctggagggtcttttgcagctcccccagaacagggacccacttcggggtgccctggagcggctcaaggcacctcctgtttcgaagccagatcatggtggctgtggtggatgggtactggtttagggacccagaacccaggcgtgcaggcctcccagccccggcccaccagccttgacccgtggggcttcacgggtgcctggagctcagcgttacagagcgtggagatgccccaggctgggagactcgggcctccgccatggccctgccagggtggacagcaggggtctgggggaggagcctctggtggaggggctttgtgacctcatcggacacacaggggcctcttccaggaactctccggggactgtgggctcccttctcctccagggatacagcctggagttttttgtttgtttgtttgttttttgttttttgagatggaatttcactcttgttgcccaggcagtgagcttagattgccacactgcactccagcctaggcaacagagcgagactccatcgcaaaaacaaacagccctatgcagtgcggggccccaggcgaggctcagaccctgcctccacggaggaggcacgatcacccagacagctctgtggaggcagggtctgagcctcgcctggggccccgcactgcctagggctgtttgtgatgtgatctcggctcaccgcaacccccgtctcctgggttcgagcgattctcctgcctcagccttccgagtagctggattgtatttttagtagagacagggtttctccatg[139 bp omitted]gggcccaggatgggcacctccaaccccagactcaaactagtgacgacacggggcccctggaagtctgtctgggttattgtaaagggaaaagtaactaaagcatttgaattatcatccctactctgccattgacccttctctaggccctgggtaagacccaaatccttactgaacctgtttctccatatctcatgtgtgtgcatgtggcgaggattcctcaacaccgacttgcaaagagagctttgggaaagagccagacacggcgcagaatcccacttccacctctccctagctgtgtgactttgtgcaacagagtccccactccttgtctgagactcagtttccctcgcctgtaaaacagggcgtattcaagagtccaggaggattgtgtaagtaaaaagcccacacttagtgcacagccctgacaggctcaatcagcggtcaactttgtcccctcctgagggcttatttttggagaggaggaggctgatattctgttattctaaaaatagtgtttattatttttaaaatgtgtcatgcaaaatacacagtcatggcagaaattctgtaaaatacagacaatcatacacattaaaagtcacccacaatcccacctctctcctttgacctggagacagtcattgtcaacattttggcgtatttccctttaggatttttgttttaatccatatatagaaagaaaaacacaaaattgggatcacagcatgcagtggttttgtagcctgctgtttcatgtcaggacatcattctttcttttttgagacagggttttgccatgtctcgcaggccggtctcgaactcttggacttcagtgatccactcgcttcgtcctcccaaagtgccaggattacaggcgtgagccaccatgcctggccaatgtcaggatatctttctatatcccaagcaagcctctctccttagcctccctgaatgacagtccctgctccgggcggctgggtggcgttctatccacagatgcaccatgttgcttaaccctcactgttggatatctagattgtttccagtttgctatggtgaacacagccataatgaaccatcttgaccttgcagctttgtcccatacgggtactgttgatcacagggtgacttgtggaacc[132 bp omitted]gaaaccctgtctctactaaaaatacaaaagaaataaataattagctgggcatggtggtgcacacctgtgatcccagctaatcgggaggctgaggcaggagaattgcttgaacccgggaggtggaggttgcagtgacctcagattgcctcactgcactccagcctaggcaacagagcgagactccatctcaaaaaacaaacaaaaggccctatgcagtgcggggccccaggcaaggctcagaccctgcctccacagagctgtctgggtgaccgacccatctcccagtcgctgccccgcccactcgggacctccacctgaatggaggtctcccctccacctgccctgccccagttacccaagcatccagccccagctctcagacaaatcgccctcaagtggatatgtatgacacatttaattccctgttctctgtctcacaaaggtttctcacatttttgtacaaaaacccaggcttccctttcccctccgtccccaccccaacatgaaaagtaattgcttaaataaataatatatgttcctgcccaggcctagatggggaagagccagggcagaagtctgtggacagacttcttggagacccaagaatccgggaccccagtcccctcctcctcggggacccaggagtccacctgcctcccacccctgctcctgaaataaataagtataaataaggcacagatgccccccaggcctcacggaaggactgtctctaactagggggagataatggcggggggatcacctggctgtttcgcccccagtactgaaataaataaataaataagatctggctttggaaggacggtggtggctttgggccccgggtcacagccgagtcttcagcagcagcagtcccctcacggcccagtcaagtgtcaggtgcagcccccccaggatggcgtgggcggccctgatgcccccccaggctgaggaggggggcgccagcgggggcgccggcgggtccgggggtggctggggcagggccaggcgggacatctgtggggagaggagagaggtgagtcacaggtagggggtgcagcgggggtgcagggcaggggtgctgtggagctgcagctgaatcggggctgcatattcacagggggactgtggcgcgtggggtgaagtgtttaggccgggagctcttcaggctgtggggttccgaaaatggaggctggagtcaggacgggcttccagagctgagtgtgggggttgggggtgaagtctgtggagtcagggctggcatctcggttctaggtgagggatcgggcctgggactgttagagtcgccggggctggaatctcagagctgggtttttgttgttgtggctgctgttagaacaattaagaagccaggcgcgggggctcacgcctgttatcccagcgctttgggaggccgaggcgggcggatggcctgagctcaggagtttgtgaccagcctgggcaacacggtgaaaccctgtgtctactaaaatacaaaaaaattatccgggtgtggcagtgtgcacctgaagtcccagctactcaggaggctgaggcaggagaatcgcttgagcccaggaggcggaggttccagcgagccgaaatggcaccattgcactctagcctgggcaacagagcgcgagactctgtctccaaaaaataataataataataataattaagaaacagagtcttgctatgctgcccaggctgtctcaaactcatggcctcaagaggtccttctgccttggcctcccctgccttgggattacaggagtgagccactgctccccaccagagctggggttttacagacagtatctgaggtctgtgggctcgagtctagggtcaggccctggatctcaaggctgaagtcttagagatggggtctctgggttcaagttcaggaactcatgggtgagggctggagtctcagagctagaagttggaatttgagatccagggtctttggagttaggcccaagaaccagggtttgaagtcttctggtctcagggctttgggcctggctttggaagtgagggtcttggagtcgtacaggcgcaggctcaggatctgaggtgtcagggttttcgatgttgggagtgagacatagggcctcagggctcggggtctaggtcctggaggtcttgggtttgtacagccagggtcccaaggctggctttgggtcaaggtcttgtatcttagggcctgggatctttaagatgtcaggatctcagggctggggcctggggtctcagggtctggaggtccatggttttcttttccttctttttttttttttttttttttttgagagagagggagttttgctcttgttgcccaggctggagtgtaatggtgcgatctcggctcactgcaacctccgcctcccaggttcaagcgattctcctgcctcagcctcccaagtagctgggattacaggcatgcaccaccacgcctggctaattttgtatttttagtagagacagggtttc[143 bp omitted]gtcttgaggtgaggatttgaattctcaaggctttgggcttcaggatggggtcttgggtcttaggggctgggatctggggactttgaggtcatggatgatggagtctcagggtcttgggtgagaatttgaagtttctgggcaggatttgggggtctagggcctcagggtctcagggccacaggatcttgggactgcagggtcagggtctcagagcaggactgttagggtcagggtctcagagcggggctgttacggtgtcagggtctcagagcgggctgttagggtgtcagggtctcagagcggggctgttgcactcgggtctggggtctcaggcttcaaggactcaggccacaggattttggggccaggggtgggggtctggggtgtcaggtcttggggccaggacataccaggagctgcagccggcgcagcagccggtccagtcgggcctgcagggtgcccagctcgggctccagggtcttcagggaagagccacctgcccggcgcagccactgcacgtgccgcaggtaggacagtaggtccgctcgcagccttgtcagcacacctgggagctggggatagagccgggacatcagagaacacccgaccagtgcccctcatcctccccgcccccttcactgcctgcctcccaccttgtccccagcccactcccttgcccttacctgtagagctcccagtgcccccgcactcatggccagggtgggcagggaatccaggttgtggtccccgtcagctgggaatttgtccctctggcagggaaaaaagctgtgaggtggcccctgcccagcctcggggctccctccatcccccacgccaggcccccaactcttcccctccctcactctgccacctgagagcccagaacccctccaagtggctgcccgcagactcctctccgttcctctctgcctctcactcctgtgctggccccagcccagtctctcctaccagctgtgcagccagctgccgcgtgtccgccaggagagagcgggtcaggagcacggtgctgtccagctcggcccgagggtctggggaaactcgaggggggccaggtggtggcccaggggcgacagctgtatctggccacaggctcagcacgaccaggaccaggcggcaaacacctgggggcaggataaggcagagagctcaggctggactccgggtctgagagaggagggcctgggcctggactcccgggtctgagggaggaggaactggggtctggactcctcctgggtctgagggaggagaggctgggggcctggactcctaggtctgagggaggaaggcctggggtctggactcctgggtctcggggaggagggtctggggcctggactcccggccttagggaggatggagctggaggtcttaagtcccagggtggaacgcccgcgggcaggtcgcagggccaggcgggcttccctctccctccctggctctggctgccccgcccgtcggagcagacgcggcccggggcgggtagacgggccgggcgtctcccgtccgcccccggacgccggaatctgggccccggggcggggcatggtgggggaggcacaggccagaacctgccccctccccgggccgcgggagcccgagctggctgggagcaggggaaggagccagaagccaggacggagcccgggagacacggacctctcccacgggagaccccttagacgccctcccaggagccccgccgggtgggcggcagaagcccgggccgcagcgcacctgggcggagaggggcagagccatgggcccggccgggccgcgggagcgggagagctggcggcggggggcgcggggggcgcggggggcgcgggggtccggagctcgctccccgcagcccaccccggccgccccgcccacccggccacccgccagccaatcagcgctccccggccgcccgcgcctcgcacacccccagcccgccccccgggcccgccagccgtcggtctgtccgcgcctccgtcggccgcatctgcccggctctccccgctttccccccgcgcccagtctctctcctccccccggctggggtcgctactccctggcttgctccgctctccgcggaccctgcctcagtttccctccggagcctctctgccggaatcccagggagtctcccggtccccgcgggctccctggggcctgggtcgatgggggtcacctccctcccggcaccagtccctgcgtccctgcccctgctcggtctccgcgtctcgctccctctcggggccctgtctggcccgtccctcctgcggcgcctctgattggctgcctccatccgctcctgtctgtgtctctctctgcccatctcctccgccgcctcctgtctccgaagctgctctcctccccggctgcctgtctccgggtccctctctgtgcgactcagcggggtctgctcccacccccgccgtgggtccctctcctccctgcctccctgtcccctccaccctccccatgaaccaacttacagttcatgtccccacagggccaggggttccccagggcagggggcagggagccgggggcctttaacccttccctgtccgctgccgggggagccccgagggtcagctgggccgcggcctggggaggggaggcatgtgccctgagcagcagggccgcggcagtgagggagtgtggacgcctggggggttatatagggggctggggcgggcgggcggggggcaggcggcaggggagggcggcctgacacatcctgactcaccctccctgcctgccttttccattcagacggagcggctgccttgcagggctcacgccgccgcgctcggaggagggcacggaaggaaaagttggaaaagttgaaaagggaaaggggggggtggtcggagaggggctggtgaggtcattggcgtcccctccctccacctccacgggccggagcagacactcaggctcaagcgctggggcccgactgtgggtgggggtccggctggaccaggactagcagagagagatggggaggcaggaggacggaaaggcagagaaaggccggacggagggacaagacaggggcctggagaggtggaggcaggaggaagagggagtggaagggaaggagagagagagagacacacacacacacagagtgaaggacagactgagacagagacagggagatggagatccacagagatggaggcagccagagagacacaccagagaagcaaagaggatcagaggggcagccctggagacagagggagaggttctgggagtcagagatcagagagcgggaggaagacagcaggagggacttggggagacccagggagaccccgaggggaaaggaacagagacaccaagactctgagacagaggatgccgcagctgaagaaaggcaccaggcaaacagagacacggggcagagtgacagggacggagaggccccagggacagaaaaggggagacagagatattagaaagacagagacgctgagatgttggggactcagcaatgggggcagagagtaaaagcctttctcattttttgtttgttttttgtttgtttgttttttggtactgagtctcactctgtcacccaggctggagtgcaatggcgcgatcaatggcacaatctcagctcactgcaacctccacctcccgggttcaagcgattctcctgcctcagcctcccaagtagctgggattacaggtgtgcgccaccacacccggctaattttgtatttttagtagagacggggtcttaccatgttggccaggctggtctcgaactcctgacttcgtgatccgcctgcctcggcctcccaaagtgctgggatgacaggtgtgagctaccgtgcctggcctcgtttttggtttttttgagacagagtctcgctgtgtcacccaggctggggtgcagtggtgtgatctcagctcactgtaacctccgcctcccaggttcaagtgattctcatgcctcagcctcctgagtagctgggattacaggcacccgccaccatgcctggctattttttgtatttttagtagagatagggttttgccatgttgcccaggctggtctcaaactcctgagctcaggtcatcctcccgcctcagcctcccaaagtggtgggaatacaggtgtgaaccaccacgcctggccttttgaaaagcctttctcaaagaggcaggtggagacaggaaggaggaggagagacggagactgaggaccaagaggcgctgagacactccatagaggcaagacctccatgtgcgactctccccctctgtgcctcagtttcctcatctgtgaaggggggttaatgatgcaccctcatccgcctaaatgccacgatgaggataaagcgagctcattcacgtgaagcacaaagtcagtgctgaccatccttattcccctcgttaacttttctgaacacatcagggacacagagaaaaagatgtcgccttcgagagagatggggcaggagcaagatggggtgaagacgggacagtggggacacggagacagtggccagaaccaccggggccagagccctggacgtcaccgcacagaggtggaggcaggagaggagtgcaggggggaggggacccacaggccaggggggaggcagcgacgcctacccaggctcacagtgggccagccccaggcatgggggcagaggagacccgggattcaccacagagcaagcgaggggcagaggtaccaagccatgtccccgagagcccccagacctagatggcagggaaggacaggatgggactgagagcgcggaggtggtgggggctctgaggctctgtgcagaccccctcgtgtcagcctccgagactgccgggctggttggaggcttccccttcccaatccagcaccactggaagggcaactgctcaggtccccaaggaggtgaggtcacagcccccccacggtgggacatgacctcatcgcctcaggtaagagctctctctccctctctctggtctgtcacagccacccctttcagggccccccaggggccttccccagcaccagctcctgctgggacccaggcctctgaccaccgggtctccgcccctcagggggcctgcttccggctgagtcagtgtggggggcccaaggctgcgtcagtgaggggagagctgacgtagccccccccagaccggcgggaccagccaaggtgactcaggccaccagcttgggggatggactagcccgagggtatgggggactggcctggggccagctggggagcaagaaaagggttctggtaatgccagccccgtccacctacagggaccagagcccaatcccccagcccctcctccctcagacccgggagtccaggcccccaaccccttccccttcagacccaggagtccaggtctccagctcctcctccctcagacccaggagtccaggccccagccattcctccctcagatccaggagtccaggcccccaggccctcctccctcagacccaggagtctagacccccagctcctcctccctcagacccaagagtctaggcccagcccctcctccctcagacccaggagtccaggcccccaacccctcctcctgcagacccgggagtccaggcccccagcccctcctccctcagacccgggagtccaggtccccaacccctcctccctcacacctgggagtccaggcccagcccctcctccctcagacccgggagtccaggcccagcccctcctccttcagacacaggagttcaggcccagcccctcctccctcacacccaggagtccaggcccccaacccctcctccctcagacccaggagtccaggctcccaggccttcctccctcagacccaggagtccaggccctaaattctagttcaagaaaggtagaggaggatcttggggcccttctgcactttggggagcatgtgtggggaaggtaatgggtctgggacaaatctggggtcccagccgctgccagtttcctgtctcgtctgggtccccagccctgggttgtgggctcagactccgtccccgcagtgtggctgcaggaggtacaggtagatggggcgggtgcagagtgacggggctgggagtgactggcaactcctgggtctgcccaggccagggtgggacacattgggctacttctgtgcaaacaagagaaagagagagagagagagacagagcaagagatgaagatcggaaaagaaacccagaggcaggactggggagtcccaagaaaatgacagatgacagagacaaacagagctggagagacaggggcagcaaaggccccaggaggcagccagcgccacggaacccagtggaagctagagaccagcttggaggctcggaaacagactgggcagccagggcccaggccctggggtggtcacagacactgaggagaagcctcggggacatgggggatggccagggagtcctggctcccgcgcggccccggggggaagccgagccggcagggtgtgaggtcagcaggtcccaggctgtgtgtgtgtccgtctgtcagtccctggggggtcccgtctggcctctggggggtgacggggcaggccggccacagaggcagcccaaacctgtcattagcggtgagggccgtgacggcggggcccccccagtcccaagccgcggtccaaggccaggcggccccgccccccaccccctccttgatccctgaggaatcccgggaattgggaagtgggtccagatgatgttgacacaggaaacggtcagcagctgcccggcctcagccccacaacccctctgaccctcacccccggccccctgcagagccccctctaacctgtgtcatctctgacgaaggcagcccggggcccactcagtacccaccaggatgtttacaggagagatgggtaacacggggagtcaccccacggggcttcctgagaaatggggtctggctcctagaccatcctcccagactcacaagttcaggcccccagcccctcctccctcagacccaggagtccaggtccccaggcattcctccctcagacccaattctggctcccagccccatccttcagacctgggagtccagccctcagacctaggagtctgggaccccccagcccctcctccctcagacccaggagtccaggcccccagcccctcctccctcagacccaggagtccgggaccccccagctcctcctccctcagacccaggagtccaggcccccagcccctcctccctcagacccaggagtcccggacccggaccccccagctcctcctccctcagacccaggagtccaggcccccagcccctcctccctcagacccaggagtccgggaccccccagcccctcctccctcagacccaggagtccagggccccagcccctcctccctcagacccaggagtccaggctcccgccccttctccctcagacccaggagtctgggaacccccagcccctcctccctcagacccaggagtccaggcccccagcccctcctccctcagacccaggagtccaggctctagcccctcctccctcagacccgggagtccaggcccccagcccctcctccctcagacccaggagtccaggctccagccccttctccctctaatgcaggtgtctgagtttacaacccccttttccttcagatgcaggacttctagcccagagactgtcccagggagctaagactccctcctcactgtgctgcaaagctgaatggatgagttggggtgcactagggattatggttccaacccagccccccattccggtttcctcttcttggaagccaagttttctctcagtcactggggagtggtggggggaatcaatgtggaagcttcaggatctccgtttagccgactccctcccaccactccctaacctctgttcacagatggggaaacaaatccaggagggaaatgtgggctccctgtccaggagccaccattacagtctccgagcagctctggcccaccaggccctcaaactcagcaggggcccacatggcctgtccccttccctgtttgttttttttttcttttttcttttttttttttgacacagagtctcactccttcacccaggctagagtgcagtggcacgatctcgactcactgtaacctccactttctgggttcaagcaacctccacctcctgggttcaagcaatcctcctgcctcagcctcccgagtagctgggattacaggcaagtaatcaccacgcccagctgatttttgtatttttagtagggacggggcttccccatgttggccagtctggtctcgaactcctgacctcaggtgacccgcctgccttggcttcccaaagtgctggggttataggcgtgagccaccgcgcccagccctatcaccttccctgctaaacattccctagacagcaggcctggcagggctgagatgaaaagcctttctcaagacccctggaccaggagacccccggacttaggctccggccccttgtctcatccccctcccaggtcttctcattgcgggggggactttccctaacaatggggctcagtgaggcctctgtgtctcacagctccccttcccctggttgttaaggcgaaaaactccctagcaacggggtttcctgaaccttcgggccacccgaatccaccttctcaggtatcagtttccttaggaaagaaactccctagcaaagcctcccagttccccacccctcagggcgccccgggtgatatggagacacgccccagactcccacgcccttccagacttctctttcccaccataagtggccaaagaggctcttctaaacctgagacgcccccactcttccaccaggtccctaaagaatcaacaccctagaccaggcatggccaggctggtgtgaagcccttccacgtccgtagcacacccctgactccctagcaacagaactcacaatcctggggcctggcgggcaggcgggcggggccggttgctggggtgatgtcctgtaaggcctcttcccacagtggccccaggggtctggggaggtgacatgttgggctgtgggatcccagcgctgggcctgctcctgctgctgcagggctcggcaggtgaggggctggtgaggcgggggagctgaggagggacgcccggctccacacagccctaacactgccctttctctcgcagacggaaatggaatccagggattcttctacccatggagtgagcagccgctgaaatactgggtcacccagggaggggagcccagatcagacccctgaatctgagggaggaggagctggggcctggactcctggatctgagggaggacgggggggtctggactcctgggtctgagggaggaggggctgggggcctggatccctggatctgagggaggaggggctggggtcctggattccttggtctgagggaggagggctggacctggactcctgggtgtgagggaggaggggctggggcctggactcctgggtctgagggaggaggggctgggcctggactcctgggtctgaaggagggggctggggcctggactcctgggtctgagggaggaggggctgggcctggactcctgggtctgaaggagggggctggggcctggactcctgggtctgagggaggagggggtggagtctggacccctggggccctgcacagagtaagcaccaggaaggcagcctgggagcatggccttggaatctcgtgtatgaggccttcggagcggagcgctgtgatgaagcaagccactggtggttggtccccaggctgtgagggtgacatatgggaccgggagagctgtgggggccaggcggccatcgatagccccaacctctgcctgcgtctccggtgctgctaccgcaatggggtctgctaccaccagcgtccagacggtgagggctcctggccccaggtccctggggcgtgggtctggcggtcgggagccccgggtcttaaccctgcctcccttgtccagaaaacgtgcggaggaagcacatgtgggcgctggtctggacgtgcagcggcctcctcctcctgagctgcagcatctgcttgttctggcgagtgggcctgggatagggcgggcgcctgcacccccagggggagggtccggcggagggcgggggctgagccgtccgctccctgcaggtgggccaagcgccgggacgtgctgcatatgcccggtttcctggcgggtccgtgtgacatgtccaagtccgtctcgctgctctccaagcaccgagggaccaagaagacgccgtccacgggcagcgtgccagtcgccctgtccaaagagtccagggatgtggagggaggcaccgagggggaagggacggaggagggtgaggagacagagggcgaggaagaggaggattaggggagtccccgggggactgctcaatacagatacggtggacggacgtgtgttctcttctctgaaagccgtggggagcagggggcatggtgcacacagaggctggggtaacaggtgggggctggagggggcttggggatggaggcttagggggcgccaggctgtggtcgtgggggtgtgagctgagggggagcctggaatgagagagatctgggaggtaagtggggaggatccgagctgagggggatctgcgctcatgggggtgtcctgggctgtgatcatggggaccctggactgaggggatagaggtgtacgagtgctggagtgcgggtctgaaatgagggagttgggggtatgtgggggtggtggggtctgaggggtgcctggactgggtggggagaggggcacgccacagctgtggaaacgtgcccctcagtctcctacatggagtgccagtgactgacagtgccccccgcccccaccccagatgcacctagattaccatgggttgctctccaccaataactgagcatggcgaggcaaggggtgggggttccgggtacaggtgccttctcgaagggcaggggcctccctcatggacgatgacttcagctcccagctccccaggggccagtggcaattttcttggaggtgcggtacagtctaagactagtcctacccatccctccctccctctccctgcaccaagctaccctacaaaagtgtttccccaagacatatcttgcaagtccagtttgtctctgtgtctgcttctcagtgaacccaaactcacacagggatgttggggcttagagtggagggtctgggctaagatccttatcccccgccccctctctggccccctctgagaaggggccagcataaggctaggctcctatatccccagggctcctggtctccccagggcaggggcagcctcacctcaggtgtggccaggcccacctgggtgctagaaggaagcaagccacctcgtctccattcccaccccagcagggtccctctcccagacagacatgcagcactaaggcaaatctgctttttatccaagtgaggagggagggggtacagggagcgtccgtctggccacggatgtaggggcagctgcacatctcagtctggtcctgacagctggagccaaggggttgtctgcaggagggagggtggagtgagcgactgctcaggaacccctcccatccctgttccgggctctctgcctgcgggggcagaggcagggagccccatccgcctgcccttgccgctcacatggactcacacacttgctccttcatccctgcatgcccccatttgctgagtgtgtgcatgcgtgtgtacctttaacgccctgaaatccaagggtagaggccagggaatgcgagccagggagaggcagaaagggggagacgaagacatgcagaaggggaaaggcagaagcacagggacaaagaaagagacctgggagacagagacacagagacaaagagtgagagagagggagacaggcagacacagtgaagacagaaggaggccgggcatcgtggtcctcatctcagaccctcaccccagcattttggctgcaggcaggaggatcacttgagcccaggagtttgacaccagcctgggtaacataggaagaccccgtctctggtacctgtagtcccagttccttgggaggctgaggtgggaggattgcttgagcccaggaggtggaggctgcagtgagctgtgattgcaccactgctctccagcctgaacaacagagtgatgggggtggctctgcccggctactcatggtggtctcggaggttgtgggggtaccagagccagaacctgtgggtccctctgctaaaattcaggttctctgtctttcatgcgctggaagctgctcactctccccagtaaacaagagtcctgggtttgaacaggcccattttcctctaagtggggcctacgttcgagtcagtgtggtctgagtctttggtggaggctccaagagtggaggcctgtgcagctgtgttagacgtttaagctacgtaaaggattctcctctcctcccctcccctcccctccccccttcccccctcccctccccccttgcccgtcccctcccccttcccccttccccctcccctcccttccccccttccctccctgcttccccctcccctcccccttcccccctcctcccctcccctcccctcctctcctctccttttctttttttgagatggagtcttgctctgttgcccaagctggagtgcagtggcacgatcttggttcactgcaacctccgcctcccagattcaagtgattctcctgcctcagcctccctagtagctgggattacaggcgtccgccaccatgcctggctaatttttgtatttttagtaga[144 bp omitted]tgagacgggttctcactctgtcactcaggctggagtgcagtggcgtgatc[132 bp omitted]tgcttatgtttgcattctatgccaagcttcatgttagcttacgcttcacccgtgcaagcagatgttcatgctttcttaccccagttccttcactgaatcacggcacgtagcatatgattggggtgactatttccccaaatctcacaaagaataatatataactggtagcattctggatgcataggagaaaagttaattccagccgggcacggtggttcacgcctgtaatcccagcactttgggtggccgaggtgggcggatcacccgagatcgggagtttgagaccagcctgaccaacatggagaaaccccgtctctactaaaaatacaaaattagccaggtgtgggggtgcatgcctgtaatcccagctactcgggaagctgaggcaagagaattgcttgaacgcgggaggcagaggttgcagtgagccgagattgcgccactgcactccagcctggacaacaagagtgtaactccatctcaaaaaaaaaaaaaaaaaaaaaaaaagttaattatttacctacatagaacgtcctaggataatagggtttaattcttttaccaaaaccctatttgagagatgaattcagtcacccaaccatccatgtgccattaaatgcattcatccactcatctgtgtacttatcattcagccccaaccatctattcaactacccattcacccatctacctatctatccagagagcgcacagaggctgggcaaactctgactgtcctatggatagtcctatggaccagccgaggcccctgccccaaggagttcccaggtgtaaccgcaagttaaggtgccctggggaggtgacacaggcaccctcatttcttttgttcagtaggagtctctgaggcctccccagtaccatgctgcatgggtgaggccgaggacacagagaagtatcaggaaaagctcttgcccctttatcaggcagggctccctctccaaccatatccattcatggttcattgcccaattcaccacctacccatatctacccattaaacaacccatccatccgtcaatccaaccacatccctgcatcaaccaacccatgtattcacccatccacccacccacccatctgtccattcacccgtccatccacccatccatctacccatccacctatccaaccacccacccatctatgcattcacccatccatccatcaaacaactcatccatccacgcacccatcgatctacccatccacccacccacccatctatcaatctatcatccattcacccatgcatccatcaaccaactcatccatccatccacccatccatctacccatccacccatccagccatccgttcttccatccatccttccacttccctacccaaccatcaacctttcctgatttcacactttttgctgggcaatgctaggaacaaggacgctagggacctaggtcttaccctcaaggcactccctgtcaggtgggagagacagtaacaacatagacacagcacatggccatataagcagcaagaggggtcgctcagacaatatgaagacccagagaagacccagagaaattaagttaaatcttaaacatgtgagaagttttctgggtggagtggagacagccaagggcactcctggtgtagagaagagcaggaacagggaccaactggctatctgtggactaagagacaccattagtgcagagaggcaggagaaatggggccaaaatatggggggtccacaggccagtgagtgcttcagtttaaccaaaggtgaagagggagccacagcaggtctttgagcagaggcaggctagctggaaaggtgtgtttaggaaagagatagaaggtagaggggaaaggggagtgaatgtgtggtggcttcatttctcctgctgttggtccttcttactcctccttttctaggcctacaggtcaggaaaatcccagctcctcctttcctaggcctacaggtcaggagaatcccagctcctcttttcctaggcctacaggtcaggagaatcccagctcctccacctacgtgttgtgtggccttgggcaaatgtggcgcctttctgcgcttcagtttcctccactgcagaatggggatggtaatagtagtgacc[136 bp omitted]catggcaaaaccccgtctctactaaatatacaaaaattagcccggcaaggtggggcgcacatgtattctcagctacttgggaggctcaggtgggaggactgcttgagcctaggaggtcgaggctgctgtgagctgagatcacgccactgcactccagcctgggtgacagtgagagatcctgtctcaaaacaaccccaaacgacaacaaaacaaaacaaaacaaaaaatggggcctggtgtacctggaagctggggctctccccgtgcggggggcctaactgtgtgactcgacccccacacttcccatctccaggggcagggtctcacagcctcccccacgtatgcacctgtgcttgctgtgtctgcggttctccgccagagccttcccgtccctgtctccaccccgccctgggactctacctccccatggccgctctctgtctccatctgtccatcgctcccccgtctgtctccattcccgtccctccctcggtccctccgtctccccgccctgccccgcccgcccctcacctgggcctcactcgctgcccgcgcccgccgccccgggcccggcctcgagcgtggcgagctgcaggcgcacgcggcgggagccggcggcgggcggcgggggcgcgcgggcggctcggcgcgctctccgggagccgggcgcggggcgctggcccgcggcggcgggcgccgaccagcggcgggagagcttgcgcgccaggcgggcgagcgccgagggccgcaggccgtagtcgcgctccagctcctggcgcgagatctcgatgttgccggtgtaccagaggatccagcccagcaggctcaggaacaccagcagcgcgcccgagtagatgagcaggtccccgaagtcgcggccgcgcacctgcagctgcgcgaacacgccggtcagcagcgccgccatgcccgccacatccagcgccacggccagcagcagcgccatccggcagcggcccaggccggccgcgggtgctggcgcggccgccggcgcggacggtgcacccggcgggctcccctgcgaggcgcacaccgctggcgccgccgccatggccctgcaccgccgccgctggcgcccagagagagcgttccggggtgcggcccggtccggggcggggtcaggggacggcgccaggtgtgccaagctcccgcctggtcacctgaaccgggctgggcgcgaaccggcgcggccggggttaccctggtcgtggtttccgtgcaggggctattgctcagaggcctgagctggtggtagccaggcgcacagccacgggtgcctagggcccgtgccacccagggaggtcacatatggccaaaaatcagggcattttagtggtggcagcatgggacactcggagccgggcgtggcgttgtttctgctcagtgtccgcctcccgaagcctgtgcagatcagacagtgcagatcagacaaggcctttagacaccaaggagctctgggacgcgagaaccagtagtcggggtgatctaagaggggaagctccgggttccgcggaagctgagtttccttcactcagcgcgtgtcttctggggtctcctgtgttcagcgaatgaagccacgggcacaaggacggacgagacccatcaggtccagagcgcacccgtggaggaagctgggcgaaccccgactgtcctatggaggatagtcctatggaccagacgaagcccctgccccaaggagtgcccgggtgtaaccgcaagttaaggagccctggggaggtgacacaggcaccctcattccttttgttcagtaggagtctctgaggcctccccagcaccatgccgcgtgggtgaggccgaggacacagagaaatatcaggcaaggctcctgcccccttagggtggccctgacaacggatcataacctcccagggagctgatggggtgtgacaggcacaccataggctggaggcacaggtggagggcagggaagaggaccggcaaatctatagaatcctaaagggagccaagagaagccacatgcaaatctccctccctccaaacaattctcccttagagggcatccgcgctcccctggggtggcagtcagcgagaagtttccgtgtaggttctccccaggcttaaacagtttaagagttttatttcaagaaaaccctggggagggcgaactgcaagagggctgccaggattagccgagggattccgaatgaagacggagtatttccgaacatacacacctctcccaagagcgtttccggagggttccgaaaatacccgagcgggcctcggcgccctcattggccatcaccgcgagggcttacgaagaccggaaatatccaaaggtgccggggctaggcttatatagttcacgcattcaccagttcattcataaaacaaatgtttgttgagcgcccatcatatgccaatcacagtgacaagtgctgggtgagcaatactggagagataacgctgaggtatgggtcccaggacctctcgaattggagccactcggaaatccagcggtagagtttcgaaaacttccgaacggttcccggaatacgctctcggccctctaaccgaagagttccgaatattcccgagcgttgagcgaattttcggcggaagcagccgaacatcatcgagccgcctcggaggtggggaccgacaactcctgtcgtgcccgcccggagaggaagcggaaatgcgtgtacggtattaaaggcgtcgcctcgcccctcgccttcctctttccgtctcaggtcgccgctgcgaagggaggtgagcgttcgtcttcctcgcgtggtcgccatctccggcccgccgcgcactccctctcagtcctctgcctgccttctccccttgcgcctcaagggtcattggcggaccccaacccctccccgtgaagtcgttgtgaattttcaagttattttcccctcactctcattcgccgcagctagtctcggctgcctgaattcggtcccgccgccttaggtcactcagtcccgcctgacaagagttctaggtcgctgtctgccctcaggggtctcccattcacccaagttcccagtcgctctcttcctctgctgtccgagcgtggcccgtggcctaacgctgctttagttctctgtgtctgacgctttccctgtgcccgtttccccgcagccgccgccatgtctgcgcatctgcaatggatggtcgtgcggaactgctccagtttcctgatcaagaggaataagcagacctacagcactgtaagtggggcccggatgcgtggctcctgcgggaggagggtcctgagtctcttgactctgggtcagagggcgggaccttcgcatgtctccgggtcccttattcacgatgccttgtgccgcctccttcccaggagcccaataacttgaaggcccgcaattccttccgctacaacggactgattcaccgcaagactgtgggcgtggagccggcagccgacggcaaaggtgtcgtggtggtcattaagcggagatccggtgagttttgtctggtttgggccagagagcggcccctttcccgggtctgggagctgtgattttttactgtcaggcaggaagagcggtaactgccatcgcggcgggcatccctggcgccagggtgttggtctgggtaccggcttccctctcggccgacttgtcagctctgtgagccgcgcgcgtctgagcccgtgtcctcacctgtaaagtggagaaatgaaaaaggacctgaacttcctcggtggttgttgagagttaaggcacggggttgatgttttcagatgaaattctcaaagcaagtcagggtggggatggatggtttcatcccacaggtgggaagattgaggcacaacaggggaggggccctcgctaccacacttaggaggggacaggctgggttggttgcagccatttgattcccattttgcctgtgtaggttagagaagaggtcttggggaccccactccatacattgtgctgtcaggtgcaggcctttttggggattccctgaatgttcgtgtgagtcgggggtctctaatggaggagtccagcttcacatgtgttcttgacagggctgtattttctttttagagtgagtttttctcaggtccttgattggaactgcctcagagccaagggtccttttactcagtggcagcaacaaacgcagtctgttggctagtgatcctcctgtctcagggacacgtagtccagggagcagccaattgcttggcacttggggaccccgttctggggagtcctgaaagctttcacctcttggattgccgaatacatgggtggcccttcctagactaagggactggcctgagtgaggctgggcctctcagccaagctgatgttgaaccactgctgtggggatgggcctggggttcctgggaagctgttcatacccattgccaggagcgtgggctctggctggacctggatcagatcctaactgaagcggcagctttctggcatgagaaaggagtgttttcatggtggacagaattgggctatgagtgtggcagaagctgtgtcctcagtactccgtgatgacgagtgagcctctgtgaaatggacaggtgggaaaacagctacctgctggcctgcccaggcacccgccacgggcccacgctgctcagcttctcaatgtgagactgtccacacctgcgaggtgtgctaaaggtgcaggttaggtggactgaccccaggacctccctgacccccaaccaggccagcggaagcctgccacctcctatgtgcggaccaccatcaacaagaatgctcgcgccacgctcagcagcatcagacacatgatccgcaagaacaagtaccgccccgacctgcgcatggtgagctggggtttggggatcaggcttggggagactggccagtgctgtggggaagggcctcccactactggttgcaatatgggctggagagggatggattcttgctttcagcctactccccacacccagcattggcctagggggcggcttgtggagtgtatgggctgagccttgctctgctcccccgcccccaggcagccatccgcagggccagcgccatcctgcgcagccagaagcctgtgatggtgaagaggaagcggacccgccccaccaagagctcctgagccccctgcccccagagcaataaagtcagctggctttctcacctgcctcgactgggcctccctttttgaaacgctctggggagctctggccctgtgtgttgtcattcaggccatgtcatcaaaactctgcatgtcaccttgtccatctggaggtgatgtcaatggctggccatgcaggaggggtggggtagctgccttgtccctggtgagggcaagggtcactgtcttcacagaaaaagtttgctgacttgtgattgagacctactgtcccattgtgaggtggcctgaagaatcccagctggggcagtggcttccattcagaagaagaaaggccttttctagcccagaagggtgcaggctgagggctgggccctgggccctggtgctgtagcacggtttggggacttggggtgttcccaagacctgggggacgacagacatcacgggaggaagatgagatgacttttgcatccagggagtgggtgcagccacatttggaggggatgggctttacttgatgcaacctcatctctgagatgggcaacttggtgggtggtggcttataactgtaagggagatggcagccccagggtacagccagcaggcattgagcagccttagcattgtccccctactcccgtcctccaggtgtccccatccctcccctgtctctttgagctggctcttgtcacttaggtctcatctcagtggccgctcctgggccaccctgtcacccaagctttcctgattgcccagccctcttgtttcctttggcctgtttgctccctagtgtttattacagcttgtgaggccaggagtttgagaccatcctaggcaacataatgagacaccgtctctaaaataaaattagctgggtgtggtggtgcaccgcctgtggtcccagctcctcagaggttgagtagaggctgaggtgagcggagcacttgagccaagagtatgaggctgcagtgagcccatgagccccaccactacactccagcctggaagacaccatgacacacagtgaggcctggatggggaaagagtcctgctgttgatcctcacatgtttcctgggcacctaactctgtcagccactgccagggaccaaggatccagcatccatggcacccctggttcctgccatcctggggtacccgattcaaagaaggactctgctccctgtctgagaccacccccggctctgactgagagtaaggggactgtcagggcctcgacttgccattggttggggtcgtacggggctgggagccctgcgttttgaggcagaccactgcccttccgacctcagtcctgtctgctccagtcttgcccagctcgaaggagagcagatctgaccacttgccagcccctgtctgctgtgaattaccatttcctttgtccttcccttagttgggtctattagctcagattgagaggtgttgccttaaaactgagttgggtgacttggtacctgctcaggaccccccgcactgtcccaatcccactcaggcccacctccagctggcctcactccgctggtgacttcgtacctgctcaggagcccccactgtcccagtcccactcaggcccatctctggctggcctcactgcgctgggactccgccttcataaggagagctcactgctcacgttagtagatggccccttctcgtgaggcctctcccctggcacctgcttcagttgtcctccacagcactgatttgcagcccacaagctggcaggtttatctgtctcatgtttgtcttgtgctggtgggcaaggggtttgtctagcacaccagcatataatgagatgcttgatgaatggtgcatattgaatgtataaagcccaccggtcctgagagtttgctcactggagactttctggagatggagtctcgctctgttgcccaggctggcgagtgcaatggcgcgatcttggctcactgcagcctccacctcctgggttcaagcgattctcctgcctcagcctcccgagtagctgggattacaggtgggtgtcaccacacccagctcagtattgtatttttagcagagatggggtttcaccattttgcccaggctggtttggaactcctgacttcaaattacccacctgcctcagcctcccaaagtgctggcattacaggcgctcgaggctttctgatgtggctgctgctgctcagaaggccttgtccttaaccacctccttgcctgccctggaggcttgtgcctctaggccccaccccctgtggagtcctgctggctttctccatccctatctgaatcctccctgctgtgtggcctcccctggtctcatccgtaacacagcccagcttagtgggcctctgttcctgcgggtggccagcctgtctgtgtggctgggctggggaggccacgtctggtatctgaatgctatcggtgggttggggtggaggaaccaggagagggctggagggagggagatggtctcagccccacagagtttggagtcctcagtgtgctgagcaaacgtggagacaccatttccctcctctagacctcatcttggagagagagatgttggatggggccatctattccagctttattcacacaaatcatgtctgttggcctggaaattggaaaaccagttaaaccaaaaacatgatattaagaaaacaggcaggctcaccatagtaaaaatgctgaaagccaaagacaaaattgggagaacaaaagaaaagcgtcttgtcacatacagaaggtccctgataaagttagtagctgccctcatcagaaaccaggcccaggcagtggggacacatccagagtgctgaaagaacctcccccaggtcatcctatccccaagagtgatgcccggcagcattcccagctcagggctaatggttcacggaagccaggaatcaaactgcctgggttccagtcccagctctgccagttatgcccagctgtggggacttgggcagctcgtttagtagcaccgtgcctcagtttcccatatgtaaaaggccattttgagtgcctttcacagccctgcataaggcaggtgtctcagtgttcactgctgtctctccagctcttagtccagtagctgcatggtgagtgagcgtagggcgcaccctggaaggctgccaagcccaaagttgtgcagagcgctggggactccagactccccacagcagcagagactcgggactgaggcatcctctgttcacaggacatgctggcatctactgggtcagggctctgctgctcggtggctgtgcaaccttgggcaagttcctcaacctctctgtgtcttcgtaccctcatctgtaacatgcgtgtcgatagaccctactactcagggttgatgagaagattaaatgtgcaaaacctgcttgactgtgcccacaaatcctgattgtaggaataaattaatgactttttataaatattttgatcagatggactcatgatcacagatgtcttcacatgcctatgactaatttgtacacaaactaatgctcgtgtttcccaagcacctggaagacatgccagatccatgtgcagtaatgcctggtggctccaggtctgccccgccgtcctgtggggctgtgagctttcccagcctcctgcccgtgtttgtgaatatcattctgtcctcagctgcatttccagcccaggctgtttggcgctgcccaggaatggtatcaattcccctgtttctcttgtagccagttactagaataaaatcatctactttaaaatctttcattatgaaatatgcatgtggtcttgaaaaactgcaaatgaaagaagagtatgcaggggaagaaaatctcagaatcccagcccctaagttagccacctgtgcttctcctttttggaaacttcacacatatgcatgcagatctcctctttttgtttgtctaagagacggggtctcactgttgcctgggttggagtgcagtggcgcaatcacggctcactgcagcctctaactcctgggcactctcaattgtcccgccttagccccttgtgtagctgggactaaggtgtgcagcaccacgcctggctaatttaaaaagatattttgtagagacagggtctcactgtgttgcccaggctggtcctgaagtcctgggcacaagcaatcctcctgacttcgtcccccaaagtgttgggattacaagcgtgagccactgcacccagcctcatctttttttttttttgaggcggagtcacgctttgttacccaggctggagtgcagtggcgcgacctcgggtgagctacgcctcccaggttcacgccattctcctgccccagc[224 bp omitted]aacaggaacctcccccttgctccttttccctaatgcactgggctgtctctccatcagcacacacaggctgcgggcccctttcgatggccatcagcgctgcattgatgaagccactcatttaaacacacccctcaatggctaatcccccagaggctccccagcacccctctcctctgttcctcttgaacacctggccctcccccaggcccagccatccctagcatgtctgaatcacacctccagcggccccagctcccaccggcctcccacacccgcccgctcccctgctgtccctccaggctgttctctacacagtagcaaattgatctttacaaatgataaatgagacctgtcatcctcccttggccgacgcacccccccccccccccgacccccatgaggaataaaagcccaaacctttctctagggccagcaaggcccgggatctggccctgtccagtctccccagcctccttaggctgtaatctctgaggcctctctcctccctgaagctcctagctggtccctaggctcagatgaagactgtctccaaaaaaagaaaaaggtataattcacgtaacataaagtccacgcttttagagtgcacaattcagtgatttttagtcttcacaaagctttgcaaccacaacccctatcttattccagaacatttcatcatcctgaatggacacccagtatccatgaagcagccactcccactcatgtcccctctagcccctgccctgccaatcaccaatttgtttttttttttttttttttgagatggagtcttgctctgtcgccctggctggagtgcaatggcatgaccttggctcactgcgacctcagctcactgcaacctccacctcctgggttcaagcgattctcctgcctcagcccctcaagtagctgggattacaggggcccgccaccacgcctggctaatttttgtatttttagtagagacgggggtgtcaccatgttggccaggctggtctcgaactcctgacctcaggtgatctgcctgtgttggcctcccaaagtgctgggattacaggtgtgagccactgcacccagctacaagtcttttttttaaagggacagggtctcagctgggtacggtggctcactcctgtaatcccagcactttgggaggcccaggcaggcggatcacaaggtcaggagatcaagaccatccaggctaacacagtgaaaccctatctatactaaaaatactaaaaactggccagatgtggtggtgtgcgcctgtagtcccagctacttggcaggctgaggcaggagaatcgcttgaatccaggaggcggaggtagcagtgagccaagatcacgccactgcactccagcctgtgtgacagagcgagactccgtctcaaaaacaaacaaacaaacaaaaagataaaggtctgttgctcaggctggagtgctgtggcacaatctcggctcactgcagccttgaactcctgggctcaaacaatcctcccacctcagtctccgaagtagctggcaccaccggtgtgctccaccacacccagctaagttttaaatatttttgtagagacaaggtctcactgtgttacccaggttgggcttgaattcctgacctcaagtgatcctcctgccttggcctctaaaagtgctgggattacaggtgtgagccactgcacctagcccagaatttctatttatttatatatatttttaaaaagaatctcactctgttttccaggctggagtgctgtggcaagatcaaggctctctgtagccttgaactcctgggctgaaacagtcctcccacctcagtctccagagaggctgggaccacaggtgtgtgctgccacacccagctaatttttaaaattgttttgtagagacacgatctcactatgttgtccaggctggtcttgaactcctgggctcaatcctcccaaagtgctgggattataggcgtgagccactgtgcctggccccacccagaatttttaaaacatgaaaaagcttatgttttgggccaatctctaaaatatattaagtgaaaaaaagcaacctgcaaatagtgtaaatgatatgccaacattcctgttaaatatttttaaatatttaaacaataagatgcatgtgtatttgcttgtatatgcatcgaatgcctctggatagtcacaatatgcaaacatttgtctcaaggaaggagagttggaataccatgtgatgaatattagcctttcttttttttccttttcttatttatttatttatttatttttttgagacagagtttcactcttgtcgcccaggctggagtacagtggtgcgatctcggctcactacaacctctaccacctgggttcaagcgattcttctgcctcagcctcccaagtagctgggattacaggcatgcgccaccatgcccagctaattttgtattttaagtagaaacagggtttcaccatgttggccaggctggtcttgaactgacctcaagagatccacccatcttggcctcccaaagtgctggaattacaggcgtgagccactgtgcctggccttctttttctcttttttttttttttttgagacagagtctcttgcactctcccccagtctggagtgcagtggcgccatctcggctcactgcaagctccgcctcccgggttcacgccattctcctgcctcagcctccctagtagctgggactacaggcgcccaccaccacacccggctaattttttgtatttttagtagacatggggtttcactgtgttagccaggatggtctcaatctcctgaccttgtgatctgcccaccttggcctcccaaagtgctgggattacaggcatgagccaccgcgcccagcctctttttctcattttaaagataaaaatttctataatgaaatggctccctttcattcttgtatctgggacaaccagttcccttgatcagggacaaccaatgttaccaggttctcgtgtatttttctggagaaattctatgcaaatgcaaggaaatttatatatgtattcttttgcccccggcttccttacatgactggtagtgtcccatacaaggcatattgcaccttgcttttttgacttaacagtaacctttgtctgagcgcggtggcacatgcctgttatccttgcactttgggaggctgagatgcgaggatcccttgagcccaggagtttgagaccggcctgggcaacacagtgaaattccatctgtacaaaaaaattagctgggcgtggtagtgtgcacccgtagttccagttccttgggaggctgagattggaggatcacttgagcccaggagtttgaagttgcagtgagctatgttggcaccactgcactccagcctgaacaacaagaatgtaaacttgtaaaaaaaaaaaaactttaaaattaaaaattctgaaatacagcatacacacagaaaagtgcataaaatgtatttatacacttaaaaaatcataaaacacctatgtaaccaatacccaggtcaggaaatggaagactaccagaccctcaaaccacccaagtattcaaccctggctggaggtaaacagtattctcacttttaggaaagttctcccccctcccctccccacccctcccctcccctcccctccccacccctcccctcccctcccctcccctcccctcccctcccctcccctcccctccccatccctcccctcccctccactccccttgtttttttttgagacgagtctcactctgtcacccaggctggagtgcagtggctcactgcaagttccacctcccgggttcacgccattctcctgcctcagcctcccgagtaactgggactacaggtgcccaccaccacgcccggctaatttttttgatttttagtagagacagggtttcaccgtgttagccaggatgttctcgatctcctgaccttgtgatccgcccgccttggcctcccaaagtgctgggattacaggtgtgagccacggtgcctggcctcccttccctttctttctgaggcaaggtctggctctatcgtccaggctagagtgcagtggcacaatcttggctcactgcaacctctgcctgccaggctcaagccatcctcccacctcagcctcctgagtagctgggactacaggtgcacaccacagcgtccagaaaatttttgtgttttttgtacagacagggtttcgccatgttgcccaggctggtctcgaacttgtgagctcaagccatctgcctgcctcagcctcccaaagtgttaggattacaggcgtgagccactacacccggcctccttgttttcttttatagtttaccaccaccatatgtatgtttagcaggagaatttatttttgcctatttttgaattgtgtatgaaggcattcaagctgtagtatcttttgtgacttgcttagttttgattatgtttgtgctgtatggtattgtttcttaaatatacaagcatgtttctgctgtttgtaatcgggacaaatgtttttgtttttgttttgagacggagtctcgctctgtctcccaggctggagtgcagtggcgcgatctcggctcactgcaagctccgccttccgggttcacgccattctcctgcctcagcctcctgagtagctgggactacaggcgcccgccaccacgcccggctaatttttttgtatttttagtagagacagggtttcaccgtgttagccaggatagtctcgatctcctgatcttgtgatccacccgcctcgacctcccaaagtgctgggattataggtgagccaccgcgcccggccaggacaaatgttttaaacctgttgtgtatgtccaagtacatgagagctgggcatggtggtgcgtgcttatagtcccagctactagggaggctgaggtgggaggtgggaggtgggaggtgggaggtgggaggatcagttgagcccgggagtttgagtccatcttggacaacatagtgataccgcatcttcttaaagaaaacaacctg[133 bp omitted]gaaaccctgtctctactaaaaatacaaaaattagcccagcttggtggcacacgcctgtaatcccagctactcgggagtctgaggcatgaaatcgcttgaaacctgtgaggcagaggttgcaatgagctgagattgtgccattgcaccccaggctgggtgacacagcgaaactctgtctcaaaaaaacaaaaagaaagaaatgggaatgtgaatttctagagtgggatttgggcttgagacgcaggaaggagttaccccggcatggatggttgtgaagaaatagaaacaaagggaacctcgatgtaaatgaaaaccaaaccgaaaccaaaaaggttgttgagtaataagttgagttcttttgacttgactacaaagtttcaaaatgggctttaccatctcactgttccaactggagtctataggagttcctagtgctccgccaccttgccaacacttggtattctcagatttaattgttgtttttctaggagtataatggcatcaatcttggtttacatttgcatttttccagttactaatgatgttgagtacctttacatgtgttgagtaaccatttggatttcctgtgttgtgaagtgcttgttcaagtgtttttgccaatttttcatgtttttttcttattcgtttgtaggaactctttatacattttgttgcgtgtgttgaggggagtggcgggggtgttgagacagagtctcactctgttgcccagactggagtgcggtggtgcaatctcggctcactgcagtctctgcctcctgggttgaagcaattctcctgcctcagcctcctgaatagctgaggctatgggcatgcaccacaatgcctggctgatttttatatttttagttgagatgaggtttcgccacgttgggcaggctgctcttgaactcccaacgtgaagtggtccaccagccttggcctcccaaaatgctgggattacaggtgaaccaccgtgcccggtttgttttgaggaagggtctccctctctcacccaggctggagtgcagtggtacgatcatagctcactgcagcgtcaacctgcccatctcaagtgaccctcacacttccgcctccgaagagctgagattacaggcgcacactaccatgcctggctaatttttttcttttcttttcttttcttttctttgagacagagtctcgctctgtcacccaggctggagtgcagtggcaggatctcagctcactgaaacctctgtgtcccaggttcaagagattctcctgcctcagccttccaagtagctgggattacagacatgcaccaccacgtccagctaatttttgtatttttagtagagacagggtttcaccatgttggccaggctggtcttgaactcctgacctcaggtgacctgcccgccttggcctcccaaagtgctaggattacaggcgtgagccaccccacccaaccttgtttagtgttttaacggaggtttcattacatgggcatattagacaaatcattgaccattggtcattgacctcaaccttcagcccctctcttcccagaggttggtaggtatgggtggggctgaaattcccaactgtctaattcggtcttggtatttctagtgaccaacccccttcctgaagctacgcaggggcccatcacagatggcttcattaggacaaagactgctcctattaatacccaggagattccaagggattgaggaactctgtcagggctaagggcaaatattatttttattatgcacttcgctaaattatttcagtgggttccgaggcccaggatgcaggcaccttccttcagcaaggactgtttgcttccctcatgcagaaatggttgacgataaacgcagagcttaagatttcttggatggccagtgatgtgaatttgatctgaaaatctgaagggtttcttcccttgtctttccttcgctccctgcactgctagaggtagagaggagtgcagacttttggttccttttctcccttagcttgggagattgtcactggaggcaagggctcaaggaagggtcagacccctttcagaggctgagccgtttcaacctcagctgttttattagaataggcaaattctttcaggacaaaagcagcctttgagttttccactctcctatgggtcagaacttgtagatttttattgtaaatgtattttactttttgtagagatgggatctcactgtgttgcccacgttcgtctttaactcctggcctcaagtgatcctttcacctcctaaagttgggattacaggcgtgagccattgcgcctggcctatttttaatttttttaaaattaatgagacattggtctaaataacctaaacgcattaatagaatgggaagtttccccaccccctggtgtgcacacccaggttaatcccttccccttgagggcagaaactaagactaagctgggatcttacccctgtgatttagtcattatcacttaagtatctggatgggcctgacctaatccggtgagcacctcaaagggaatgggcccttaaatcagacctgccagggcccaaggaggggcagcttcttggagctaagaccctagttctacgaggactgaaatcagccaacaaccatgagcatggaagaggacccagactaaggaacaccaacaaccaatacctcaattttagcctgcaaagcactgagcagagactagctcagccgtgtccagacttccaacacaaagtctgaagtgggtgttgttttaagccgctggctttgtgatctgttgtgcagaaatacatgtgggaacaggctttgctgcccacaagggaaaaaccaatctttagcacaaagcaggatcagatgattcaaggggaccgaaccttggcccagtccagaaccagacagacgaggcgagcctcatgccagactgctggcacctggccgtcctgagcaggaacaccactgccacaccaacgtggccattattctagagggagaagtatagggcagtgccgctcaggccaccaggagcagctccaggtcctcgccccattttagattggaaatctgactccaaagaggggttgtgaccgctctacctccacagaacaaagaggtggacccaaacctcaaacagcaaggctggtgagctagatggacccactgctgcagtccatgaggctttacaaggacccagggcctgtgcaggggagccaaactcccagagccacatggcaccatgcagcggtcctggggcatctgtgagacacagaagctgcttttccaactttatttagaaaaacaaatccaggtcccagtgccccctgtaccctccccgaccccagccataatttaaataacttagagacagagttggagggaggggacaggagaggttggggtcacggtggaaggaggaagagagcccactacagccgccgcagcgcccgcttcttgtccgtctttttcttggccgccagcttcttatcgcgctcgccagcatgcttcttggccatgggaccctcagcccctcccgggccccctggggccccagggtcggtggaggaagcttcagtgccactggccagggcccgaccggcttcggccctgccgctgggcccgccggcgcccccgtggatctctgtgagcagacgggcccgagccgcatactcctcgtagttctccaagagcaggcggcccgcctcctcgttgagtgcagactcggggttagggtggatcagcaggcacttgatggtctgtgggaagaggctcagggtcacagtgggtcgggcaacctacagggacccccaggcctccacaagagggtggcctccgcactggctgttccttctgctcccaactcagctgcagatccaggccccacctatgctgcatcctccctcatctttgctcctgtctccctcagaggccaccttcatgtgacctgcctcacagcagatgttcccaaaaggacacgatgccataggcccaatggtttaaaatgtccctggtcctccgtggaacttgctgggtaacgggggaaacgccaaggccccctctcaggagtccattacttgcctgagccccagacttgagtcctattatggttttgaatttgcctccatgcagttcagcatgaccttagaggccctctggttcaacgagtgaggcctgcagcctggacagagagaagagacttccccagggcctcaggatttgaggaaatcacacctgcgtgttggactctaaagctccccatctttccagatacagcataaatcctgacctctgtcttttatcagacatccgaagttcacagcctaagactctagctgggttggaccacacacaagagggcaagacaccaggactgctggctgaggtgcacttcgagggtggtccagagattcctctcaacccccttcacagcccgtcctgaggggtaaattggagtgcagaggtgtgacctgcagccaggcctccagcagccccagctggatcctctgaagtgggtctgggcaaactggccacagcagtttgctccctggggccactatgacacatacacagtacctggctcagcagatgctcagcagatatcactgatggtgaccaggacacaggttcccaccctaattctcatcactgcacccaaactgcaggtctggctgctcttcttgctggctgagcccctgacaggcccagatgctgacctagcagcaagtaggcctggagctcggtgccaatgtccccagcagcctccaatgacaccccaggggaagggaggcggtacatgtgggagggaagggtttggggtctgtttaccttggagctcaatcctctccctccccatggcaggaaaccccaattccccaccctctctgccatgtgccccagggactcattagaaatttggttaacttttttttttttcagcttgcgggaagggttgggaggcagcaggctgtaagcagcctggagcaccagcctagaccaggacgcctccacctcagcaacaccgcagccaggtcattctgtgtcatggagccatctcgtacgctgcaggatttgggcagcacccttggcctccacccactagatgctagtggcacccccgagttgtgacaaccctttctggtctcctgacaatgcataataccccttggggggcaaaatcacctctggctgagaaacactggtttatgaaccctatcgctattaaaaaaccactgaactgtatactttggaactgagttttacggcatgtaagctcagctttagcaaaaaagcctctaatgagaccccatctctgcaaaccataaaaatataaaaactagctgggtatggtggtgcatgcgtgtaataccagccattcaggaagctgaggcaggaagatcacctgagcccaggagttcaaggctacagtgagctatgactgcgccactgcactccagcctgggcaacaaagagccagtatctttaaaacaaaaagaaagaaaggaaagaaagggaagaaagaaaaaggaaagaaagaagaaagaaaagaaagaaagagcttctaactagacccttgacctccacctgtcagaaaactgtcctacagggtaggcgcagtggctggctcctataagcccagcactttgggaggccgaggtgggaggatcacttgagttcaggagtttgacaccagcctgggcaacaaatgagaccccattcctgttttattttttatcttattttttttttttttttgagatagagtctcactctgtcacccaggctggagtgcagtggcgcgatctcggctcactgcaacctctgcctcccaggctcaagcgattctcctgcctcagcctcccaagtagctgggattacaggcatgtgccaccatgcccggctaatttttgcatttttagtagagacagggtttcaccatgttggccaggctggtctcgaactcctgagctcaagtgatccaccacacctggcctaccctatccttgttttttaaaaaaaagggagaagagaaaaaccatcctacaatacaaactcaccactcgttgcatagtaaggtgctcctgggcacttctcaacagtacttgggtgtcctgggtctggcactgtttgtctttccaggaaagctagcaacatggatttttatgtggaaaccttcaaccacttcagagttgattcagaaaaactaaacaaagcgctatggctcagacaccagcagacctccagaggcaggaggcaggaggcccagccccagcccagaactcaccagcagtacgtgtcggatgcccagctcagccgtccagtccctcttgagcacgttgacgcagatctcgccattggcgcccacgttcgggtggaagatcttggtcaggaagtagcccttgggtggggaggcagggaagtccttccccagcaggagtttcatgcggaacagacctccagcatatggggtcccctctggagtggagggaggggtacagggtcagggcactcaggagtcccaaggcacctcaacaccccaaagtccagtctccacggtctgattgtgatgcaggtgggtgccccgccaactctgccaacagactggaggattctttttttctttttttgaaataaggtctcttgtgtcacccaggctggagtgcagtggcacaatctcagttcactgccgcctgcaattcctgggctcaggtgatcccatctcagcctgccaagtagctgggattacgggcatgccaccaggtctggctacttttttattttaagagatagggtctcactatg[220 bp omitted]catggagaaaccccgtctctactaaaaatacaatattagccaggcgtggtggtgcatgcctgtaatcccagctactcggaaggctgaggcagaagaatcccttgaacccgggatggggaggttgcagtgtgcggagatcgcgccactgcactccagcctgggcaacaagagcgaaactctgtttccaaaaaaaaaaaaaaaaagccaagcgcggtgcctcacacctgtaatcccagcactttgggaggctgaggcgggcggatcacaaggtcaggagttcgagaccagcctggccaacatggtgaaaccccatctctactaaaaatacaaaaaattagctgggcatggtggtgcacgtctgtaatcccagctacttgggaggctgaggcaggagaactgcttgaacccaggaggcagaggttgcagtgagcagagattgtgctattgcactccagcctaggcgacagagcaagactccgtttagagagagaaaaaaaaaagagcaagaatggctgggttcctagggggccacaggacctcccccaaaacctcagagatgatgcccatcttgcagcccccacctgtgtcactatcaagctcgtctgcaccctcctggatcccccgtctcagcccaactgaccactccagtcacaggcccttcccaggtggcagggacccaagtacgcactttcctataagatgcccatttatatgcctttcagatcaaggatccaactgtctgttaattccacagcctcccaacccagtgaacgcctctcccactcacccacttgcttgggtcaaaatactgtccctcccctagcccatcagcagcctgagcaccggcctgctaggtcctcccctgaatctcatcccatctccaaggctagcttcctggctggcctctgggttcttccccctgccaggccggctctcctcactacagtcaataggaactttggagggatttgtcacacccctgctttaaaccttccaccagcttcctctacaaactccttgaagaggcctagaagccctaaaagagcttggcagcttcatcatcaactttcttcatgtgtttttaccaagcgcccagctccacctgcccaagggcctttctggagccttcctattgtcatgatcccgcgccctctgcagcaaggcatgaaggacctcaactgtcaccgctgccaggtctttcctgaccacctaccaccatcaccaccgtggactagaccattccttcacaggctctgctcaaatcctgactttgtaggaattctggtgataacagaaatgtagcctgcatgaaacagtattctaaatcactccgcaaatcatgtgacccgcaaatcattcatgacccgtctccccacgatctgcatctggcttgtttcctcatccctgacactcacagcaggatggagtttgagatcacctggcccaccctcccaggcccttgctgacaccattcccaccacctggagctctcttcccattcctacttaattcctacccaccctcaggtccagggaagccatgtctgaaagccttgcttcaaatctagagtaccgtcccatgatatactaactcaatgaccagatatttctcaacccttgtgggaaaagagtacataattgtcatttgtggcgtcctgccctgtccaccaatgcatcccaacacctgacacgaggccagcctgtaatgggtacttcccgctagggtgatctagagcagggtgatggaggatctaagcagcagccccttctctttttccttccaaactcaccagggccctcgatggtgacctggaggtcggtgaggtcctcctcgttgggaaagaccttgatgccatcgggtgggtctgcggtcagtgtcgtcacctccttgtacaccaggcggatgatgtgcgggggtaggttctccacgttggagttctgggcacggatgggagagcagggtgagcgagtgttaagagctgggcttcccgcagggcctaaagatgctgagactgcccaagtcttgactcagtggccccaggctgtcaatcacccttgaactcccagaccctcacccaggatgcttcaggccatcagcccaggcagagtttccaacagaaatgggggcgggttcacgggggggcttgcagataactccacccaccccagaaccccccccccaaagcccgctcctaaccctgcttggtccccagtggttccacgtaggccagagatctactctctcccccttctccactaatttttggttagagcatccttgaaaccccggctcaggtctggagatggcggcggggcgtccttgctcctggtaacacccatgggcgggccgcaaagcgcccggagccctcgccgccagggagactgcgggccgcccgagctcctgctccgcctgcgggaaggccctcgggcccatcccgggtcagggacccccaggctggccctcaaacccctcaaggccgcccgtcggaggcccctgagactccacctcctccctcagggacacccccgaccaccttcatgggcctcatcgcccgtgctcaccatggctgcggccggccgggggcgggtccccccggcccccttcctgcgttcttcggtccgccggccggggcggggggcccaactgctgccgctgcggccctggagaggccccggcggccccgctccgctccccgctgcctccgacgtccgccgcgcacagcgtagaccaacccgccgccccggtgcccggcagcactgagccggccgcgcgcgcaccactgcctctttataaccgcccgcaggccacgccctccgcggcccctcagctccgagcctcaaccgtgacgtcagcgcgcacgttccttggttttcgacgcgctcgctcccttccccgcaaactatggtcagaagcgagggaagtggcggagagggctgggtagcgggccggccaatgggggcccgcgggggtcgggagggttctcaaagaacggaggggctgaaaaggggaagaagagaggaagggggacggggaaggcgacgcggccgctgattggaccgtttgaatgagacgccgccacggcccggcatacgcgcgggcgcgccctgacgctgaggaagtcgcgcacgcgactaacggtcttcctgggggccggagcgtggcgaggggaggcgggactcggggttttaaacgcgtgatggaaggcgctcgggccaatagggatgcgctttagtgactggtgggtcacgagactcgcatgggccaatgactgatagagaccggtcagagggcgacccagtttcgtgcagatcaaaccgctgccagccaacgaaatccgttgatttttgtatatgcaaatgaagtgtgcgctgccgcccgcgccccctcctttgagccgtggtggaggtgggcgctggaactccgactacatttttctatgaggcgccattttgtgctggaaatgctcttggacccacgtcctgtattgctaaggctcaaagatcagtcagaatgaccttgaaggcttggacagccttgcactccgtgtgtgacccccactcctgccaggcttcatcgaagacgccagcctcagtttccttatgtgacaaatgggcactgggatccgttgtattgccagggaaagaagtcagagagtgccaagacggttattcacggcatggttatgcctatgactgacccatggcctccagccacacccgccttctctgggactcagtttccctctctaggaaatggacacatagctgcctggaaaagggaccatctccagccctcagtgtcagtaaaaacgtcaggcaattgcttgagaacggtggccagagctccctgagcaggccttttggaggggcttagagaggaggagggaatgctgaagttggccttcctttgctcatctgtgcagtgcggtcgcagtgccctctcggtgtctctgccagtctgtgcgtccacagctcttcttagtttcttggcctttttcagccatggatgagagcattaacatctgggcctaatttggccacaggtacctgaaaagacccctggctaccagcttcccctcatggggcctcagcttctgaagaag[133 bp omitted]catggtgaaaccccatctgtactaaaaatacaaaaattagccaggtgtgttgatgcagccctgtaatcccagctactcgtgaggctgagatgggagaatcggttaaagccgggatgtggaggttgcagtgaactgagatctcgccactgcaccccagcctgggcaacagagcaagaccctgtctcaaaaaacaaaaaagcaaaaaaaaaaaaaaaaccaaaaaacaaaacctacatggtcgggtacagtgactacgcccataatcccagcactttgggaggccaaggtaggtcgatcacttgagcccaggagttcaagaccagcctgggcaacatagtgagagacccccaccaatatgtacaaaacaaacaaacccaaaacaactgaagaaacagctacagcataaaaagtcatcatcataactagtttgtggagaaatggcttcaggtgatcccttcctgctccctcaccccaggtccaatctataccagttcctgttgacgtcatctactgaatctcatcacgtccccccatccgctatgccaccagtcctgcttagagtcaacgtcatcccattttgccgataagcattttgctgatcttcaattttagcctgctgggtgtggaggattccaacccaattaacagacaaggaagctgaaggagcaggaggtaaagtgacttgctcggggttccccagctgggacaaggcaaagctagtggctaaattcgtcttgatcttaaaaatccacccaaaagacataacaataatgatgataatactaatggttattatgtattatttgctgtgtgccagaccctgttctagtttctttacatgcttgatgtcatttaatccttgtaacaaccataatgggtggatattattaattattatgatcccctctggatacctgcatttattcaatacatttgttcttctttattagtgtctacactctagctgtcaggatgctatgggatacagcagagaataaaagggacaaagcctcgactttcatggatcttacatcctggtgcgggagccagatagcaagtaagtctataccatcatgtcagcaagtgataaagactgaagaacaatcagcaagtgataaagacaggaacaattagtgggagggggaggtttgagagggagggatggggctgccattttaccttggctgggcagggagaatctgtctgaggaaaggtcatttgggctgttggaaggtctatgggaaaagcattttgagcaaagggaacagcaggtgtcaagaagattgtgcttggtgcttttagggaacattaggaggccagcgaggctggattggagtgaggcagagcaagtagagggctctgaggtgggagaggtgaggggctgctggtgggcctcctaggccatggtgaaaagtatgtctgttttttgagcaatggggagccattggtggctttgagcagagaatgactccttcagacttatgaacagaaacagggaggccaatgaggaggtgattacctttgttcaggtgggatgatggtggctccaagcaggattggtggcattaggaatgggggaagtgatgagatgatgtcaacagcaactggtatagattggacttggggtgagggagcgggagggatcacctgtaccctaaataatcacctgaaaaccgggaaggcagaccttttccaaaaaggttttccaatgctgtggtccattggtctctggtccaactcactaaactctgcccttgtagctcctaagaaaactaatgggtgtgtttccaaaaacaggcagtggccaaagtaggcccctgagctatagtttgctccctgctttacacatatcccacgtgccccaccccagctgaaaactcaagagtcctcctccccactacattttgcataagccccagactccccaaaaacccataagcccttgcaccatctcctgaggcttccttgcctttttctgtttgttcctggaatacgccaagctttttaccctgaggacagttggacaggcagttctctgtgccggtcgtgcttttcccctttccttcttctcatctcctaggtttaccctaactcgtcaccccttcacggcagcttctctcctctttcctcccctcccatgctctctttgcttcatcctctttgaacttcatgatctatcaggatttgcaattatttgcctgattgtgtgtttgactcttcccaactagaagattagccccagcagagcagggatcttgtcctcagtccctagcagggcgccagacagactgaagatgttatacattcaaccaatatttattgagcacctactatgtgccaggcaccaatctgggtgcttgggatttatcagagatcagatagacaaagatctttgtccttgggatgcatcagataacagatagacaaagggcttactgtagttgaggaagacagaaccaaaaatgaaacataataaataaggaaaacatggtattttagaaggaactacatgttgtggtaggtagggaatactctctgttaaccatgtttttcctctgctctcatgccacaataatcaactgatcttcaacaaagcatacaaaaacataaaatggggaaaggacaccctacccgataaatggtgctggggaaactggcaagccacatgtagaaaaatgaaactggatcctcatcgctcaccttatattaaggttggtgcaaaataaatcgaggtttttgccattattttaatatttgcaagctatacatctgacaaaggactaatatccagaatttacaaggagctctaacaaatcagcaagaaaaaaaatgatccaatgaaaaagtaggcaaaggacatgaatggacaattctttcaaaagaagatattgcaaacagccaacaaacatatgaaaactgctcagcatcactcattatcagggaaatgcaaattaaaaccacaatgagataataccttactcctgcaagaatggccataattaaaaaaaaaaaaaaatagatgttggcatggatgtggtaaaaagggaacacttttacactgttggtgggaatgtaaactagtacaaccactatggaaaccagtgtggagattccttaaagaactgaaagtagatctaccattcgatccagcaatcccactactgggtatctacccagaggaaaagaaatcatatgcaaaagacacatacacatgcatgtttatagaagcacaatttgcaattgcaaaaatacggaaccaacctaaatgcccatcatcacccaatgagtggatacagaaaatatggtatatatacaccatggaatactactcagccataaaacagaaaacagaatgaaataatggcattctcagcaacttggatggccattattcttttttttttttttagactgaatctcgcactgtcacctgggctggagtgcagtggtgtgatctcagcttactgcaacctccgcctcctggcttcaagcgattctcctgcctcagcctcccgagtagctgggattacaggcgcccaacaccaagcccagctaattttttgcatttttagtagagacggg[145 bp omitted]aaaatcaaataccctatgttctcacttataagtgggagctaagctatgaggatggaaagacataagaatggtacaatggggccagccattgtggctcacgcctgtagtaatcccaacactttgggaggccaaggcaggcagatcacttgtggtcaagagtttgagactggcctggccaacatggtgaaaccccatctctactaaaaatacaaaaattagccatacatgttggtgggcacctgtaatcccagctactcaggaggctgaggcaggagaatcaccttaactcgagagatggaggttgcagtgagccgagattgtgccactgcactccagcctgggccacagagcaagattccatctcaaaaaaaaaaaaaaaaaaaaagatacaatggacttcggggactggagggtaagattgggagggggtgagggataaaaggctacatactggatacagtgtacactgctcaggtgatggaagcaccagaatgtcaaaaatcaccaccaaagaacttatccatgtaaccaaacaccacctgtacccccaaaactattgaaatataaacaattaaaattgtgatgatggtcgcaaaactttgtggatatatactaaaaaccattgatttatgtagtttatatgggtgaattctatgatacatgaattacatctcaattaagctttttatcttttttttttttttttttttttggagacagggtcttactctgtcacccaggctgtagtgcagtggcatgatctcatctcactgcagcctccacctcccaggctcaagcaatcctcacacctcagcctcccgagtagctgggactacaagggtgcaccaacacaccaggctaatttttgtgctttttatagagattggttttctccctgctgcccactctggtctcaaactcctggcctcaagcaatccatctgcctcagcctcccaaagtgctgggattacaggtatgagccactgcacctggcctaagccttttttttttttttttttggtaagaatttaaaaagttactgtgatgggggaaactcaaagaaagtcatagggatgggagaaagagagagagagagatctgagggacagtgttccaagttgggagaggtggccgggaagggctaggctctgcagactccagaaggccaccgtgaagagtgtgcgtgagctctagggagctattgaagaggtttttttttttttctttttttttcttttttttttttgagatggagtctcgctctgtcgcccaggctagagtgcagtggcgtgatctcggctcactgccagctctgcctcccgggttcacgccattctcctgcctcagcctcctgagtagttggaactacaggcgcccaccac[138 bp omitted]cctggcctattgaagagttttgggcagaggggtgactggatttggtgctcatattgggactgtagctcagggctgctggtagagactggactggagggtccagattggaagcagaaaatccagcagcaagtggactgtggcttggcgagggtggcgaccgtctgggaaaggggtggagggaagggagcagatgtgagaactaatcagaaggtggtctagtgataggcagccttccaaatcctttgggagacaggaattgtcagaggatgggattgggaaggggcaccctttctttgctaagtactagtaacccatgaactcgcttttgttcagggccgggcgtggtggctcatgcctgtaatcccagcactttgggaggcctaggcgggtggatcacctgaggtcaggagttcaagaccagcctggccaacaaggtgaaaccgcatttctaccaaaaatacaaaaattagccgggcacggtggtgcatgcctgtgatcccagctattcaggaggctgaggcaggagacttgctttaatctgggaggcggaggttgcagtgagccgagatcacgccactgcactccagcctgggcagcagagtgagactctatctcaaaagaatttacttttgttcagtgaaacctaaattgtccctttggcttgaattctggtttcagaaattaatcttcatttctgtccatctgtattaaattacaaaagaaataggtgtttggagggaaatccacagttactgaggcatgggaaatgaaggctggaggtgctgctctagccctccttcccctcctaccctccacatccacacttctctccgcagcccttcccgtccacatcgatcagtagccttcaattaaactgctgcacagcaagtgtcactcaatacaatcacagtatagagcaggtgcagtggctcatgcttgtaatcctagtactttgggaggcctcagagagaagatcatttgaacccaagagttcaagaccagcctgggcaacatagggcaaccctgtctctataaaaaaataagaaattaattttttttgagagagagagtctcaccctgttgcccaggctggagggcaatggcgtgatctcggttcactgcaacctccacctcccaggttcaagcacttctcctgcctcagcctcccaagtaacagggattataggcacgcgccaccacgcccagctaatttttgtatttttagtagagacagtgtttcaccatgttggccaggctggtctcaaactcctgacctcagatggtccgcctgcctcggcctcccaaagtgctgggattataagcgtgagccaccgcacccagccaaaataaaaataataaaaaaaaaagttagccaggcttggtggtgtatacctgtagtcccagctcctcgggaggctgacgtgggagaaacacttgagctgaggaggttgaggctgcggtgagctgtgttcacaccactgcactccaacctgggtgacacaggaagaccctgtcgcaaaacaaaaacaaaaactctcaaaaaacaacagaaaaggtcaaagatcccactgtagtttcatcgtactctctgactgatgggcatcaaggctgagcccagcgcatggctagacactgctgtgagcatcctccttcatctgttcatctttgggtacagccgtgaacatttccgaaggacaaagtcttaggggaactttcaagatcaaagagaatgcgtgcttgccattctgcccagtggcccttggcagggttctccttatttggattcccaagatgtgacttactcgtttaacccgtatttctttagcaccagatatacaccgggcactgttctgggtgcttgggacacatccgagaacaagataggaaacaaaatccctgccctcctggggcttccattccagcggggagactaaaagtcttcctgggactgagtggcagcccaggatgcaggcctttgcatgctcacactggggaagtcctgggctaataggtaagtcaagttggtagtattaaaagatattggcaatgcacagtggctcatgcctgcagtcctagcactttgggaggctaaggcaggaggatcacttgagctcaagagtttgagatcagcctgggcaacatagtgggaccctgtctctacaaaaaaattaaaaattagccaggagtggtggcacatgcctatagtcctagctacttaggagggttgaggcagaaggattgcttgagcccaggaggttgaggctgcagtgagccatgatcacgccatggcactccagcctgggtagcatagtgagaccctgtctgaaaaatagaataaagatattaattgctgtaaatattagtgtaggctaaggaggttcaggaatgttgtgagggggacagttttttttttttttttttttgacggagtcttgctctgttgcccaggctggagtgcagtggcgccatctcggctcactgcaacctctgcttcccaggcagagattctcccaggagaatcaagcagttctcctgtctcagcctcccaagtagctgggactacaggtgcgcaccaccatgcccagctaatttctgtatttttagtagagatggggttt[142 bp omitted]tgttgcccaggctggggtgcaatggcgtgatctcggctcactgcaacctctgcctcccaggttcaagcagttctcctgcctcagcctcccaagtagctgggattacaggtgtacgccaccacacctggctaattttttgtgtggttagtagagacgggctttcaccatcttgtccaggctggtctcgaactcctgacctcgtgatccgcctgccttggcctcccaaagtactgggattacaggtgtgagccactgcgcctggccaagggggacagttttaaatatggtagaactaattgagaaggtaacatctgaataaagattcaaatgaagcggccgggcacagtggctcatgcctgtaaacccagatcccagcactttggggagctgaagtgggtggatcacttgaagtcaggagtttgagaccagcctggccaacatggtgaaacctcgtctttaataaaaatacaaaaatcagtagggtgtggtgattcgtgcctgtagtcccagctacttgggaggctgaggcaggagaatcacttgaacccaggaagcggaggtggaggtggtggtgagccgagatcatgacactgcactttagcctgggtgacagagcgagactttgtttaaaaaaaaaaaaaaattaaaggaagtaagagagcaagttttgtgggaatccagagaaaagccattccaggcagaggaaactgccagtgtcaaagtcccctcacaggagtgagcctgacgatgagcagtcttcaaaagattccacatcatgggcaagtcaaggtgtcccatcttttatttgcatctcctttcttcccagtgaggttgagcatcctttcctgagtttctgtgtctgctagtctgtggttggtagcaggttctctgctccttagttcctgagtacttctgagcagacacttgtgaccttcccagcttgaggggtctgcacacgctggggtaggtaattgacaaaaactactttcctctgtgcctctggagctgaacttggaactctcctgggtgggagaggccctgatcaatgcaaaaataggcccttaagtggatcgggtgctccctctagtgacagacacagcagtaattaaatgcattacccggggccaatcctgcttcgcaaatccctgagcacaaggcagagacttcttgagtgcactaggaatttcttgtaatgactgtacaaccaacactggtgacgcacaccaagcttaaacagaaaaatgcccagtgctggggagggtgggagcacacggacattttcacatacatggacttggcacaggccctctgagtcgtagttggcattgtctagcaaaagtcttcaaaatacacctgccactcatctcctgagagctcatcctaaagaaaatggagggagtggccgggcgcggtggctcacacctgtaatcccagcactgtgggaggccaaggcgggttgagggagtggccaggcgcggtggctcacacctgtaatctcagcacttcgggaggccaaggtggattgagggagtggccaggcgcggtggctcacacctgtaatcccagcacttcgggaggccaaggcgggcagatcacaaggtcaggggattgagagcagcctggccaacatggcgaaaccctgtctctaccaaaagtacaaaaattagctggatgtggtggcagtgcctgtagtcccagctacttgggaggctgaggcaggagaatcgcttgaaccagggagtcggaggttgcagtgagccaagattgcaccactgcactccagcctgggcgacagagcaagactccatctcaaaaaaaaaaaaaaaaagaaaaaagaaaaaagaaaaaattaaaggaatgcaccaagtgttgtgcaaaaagatgttcctcaagtattgtttagagtagtaaaaactagggaaaacccaaacatctattggtagtgatggcaggggctgctgctatcatgctggctgcagcagggaggtgcagctggggctgcacgtttcatggagccgggggagccccgccccttctgagttggggcagagctccccaggtgtcactgcagtcacccaaactgtggctgtggatctgagcctccctgtgctcttgggggtgaggggggtggtgccaggaacgggcaggatctgtcctcctgggtgcagctgcagccaccagacccggtactgcaaatctgggcctccagctccacagagcaggcaggagctgggacaagtgggagccctgccccttctgaattggtggggtgggagcttctgggtgcagtggcaactgccctcccaggcatgggactcaagagtctctgcagcctgcacccttgggggccccaggaagggccccccatcccttcagtctcaggggtgcctgttcccactgcctggcttctcaccgctcctggctcctgctcccatctcagatcagtggttagggcagagccccggggctgtgaatggcagtaggaggcctgggcagaagggggcagtcctaaggagggcctgaaggctgggggctgggctatcagtcctgaggaccagagtggggacacgcggtgcctcttctgggctgcccatggctacccatggaccaatcagcatggacttccttccctctgaggcccataaaagctctgggctcagccagagcagggcaggggacagccagagaaggaagagggaggagagaggattggactaccagtggcagagaagagctacctgcagactacctgctggcagagaggagccacccccaccagggcctcctctctgctaagaattgcagacattaggatgaccagttgtagggaggagctaccctctccagaacctcctgtctgctgataactgaacactcaacagatgacctgcctacagagaggagctacccactgtgggtcctctgagcggttgtaacactaaatcaagctcatccttgtcttcttcacccttcacttgtctgcgtacctcattcttcctggactcaggacaagaactcaggcaaaggcatcattggcaacagaggtttccagcggggaagaaaatctacaccccaaagatcctgtagcagtaggaactgggaaaaaattatgctgcatccatacaacagaatatgctatagccactgaaaatgagggaggttttgttgttttttgaatcactggtgtctcgaagaatctgatgaaagtactggatccatttccctgaaaaaagcaagtacaaatgctaacgaatacatgtgagaagaataatgagtttggaaaattatcatctgaagattgctgttcaacttttggagagtgatattcagatgctttgaagacttccaatattcaaacatcgttgtaatgcctgattcagccaaggccgggcatggtggctcacacctgtaatcctagcactttgggaggc[134 bp omitted]ggagaatcgcttgactccgcaaggtagaggttgcagtgagccgagatcacactgctgtactccaggctgaatgacagagcaaggctccatctcgaaaaaaaaataaaaaaaaattgattcagccaagagaatcatcagtggaggccaaagcagcatgtgaaagtttgaggagaaaaaagataactacatagcatcaggctaagtgtggtggctcatgcctgtaatccaagcactttgggtagttgataccttgatcttggacttccagcctccagaactgtgaagaaatagacttctgttgttggccaggtgcagtggctcccacctgtaatcccagcactttgggaggctgaggcaggaggatggcttgagcccaggagtttaagaccagcctgggcaacacaatgagacccccatctctattaaaaaaaaagcttaaaaattagccaggcatgttggtgtgcacctgtaatcccagctattcaggaggctgaggtgagaggatcccttgtgctcagaaggccaaggctgcagtgagtctcgttggtgccactgcactccagccttggtggagtgcactcagagcatatgagctctgagcacatgaacttcaggaagcatgagagcatgggcttccttcagccaaagcgctgagactctggcatcccttctgtggttttcctgtctcacacatgtaacccagatctaatcatgaggaaacatcagatgcgcctaaatgcaaggcatattctataaaatggcctacctggattctttaaaaaatcagcattaaaaaaggcaaagactgggctgggcgtggtggctgccacctgtaatcccagcactttgggaggctgaggcaggaggatcacttgagcccaggagttctagcctgggcaacatagtgagaccccttctcttaaaaaaaacatctccttaatctctgcgtgaattgtgtgcaataataaaaaataaaaatagaaaagaaagacaaagac[136 bp omitted]cccgtctctactgaaaatagaaaaaaatcagccaggcttggtggcgggcacgtgtagtcccagctacttggaaggctgaggcaggagaatggcgtgaacccaggag[140 bp omitted]tgtcacaaactgaaagctgctctgaaagacagtagcaggacgcttgatgcaattcaaacatggacttggtcaatgctaaattcttgagtgtgataattatgctgtggatgtgtaagagagtggccttgttcttcagaatggcctctaggggtaaagggatgtgataggtgcaacttactcccaaatatctccaaaaaaaaaaaacacgatttttttcttttttttagaaggtgtctcgctctgtaacccaggctggagtgcaatggcacgatctcggctcactgcaacttccgcctcccaggttcaagcgattctcccgcctc[134 bp omitted]gcctcccaaaatgctgggattacaggggtgagccactgcacctggcttttttttttctttcttttttttgatggagttttgctcttgttgcccaggctgtggtgcaatggcacgatcttggctcactgcaacctctgcctcctgggttcaagcaagtctcctgcctcagcctaccgagtagctgggattacaggcgcctgccaccacgcccagctaattttttgtatttttagtggagacggggtttcattatgttggccaggctggtctcaaactcctgaccttaggtgatccacctgcctcagcctcccaaagtgctgggattacagacatgagccaccatgtccggcattttttttttttttttttttatgagacaggttctggctttgtggcccaggctggagtgcagtggtgtgatcttggctgactgcaacctctacctcctgggctcaagcgatcctcccgcctcagcctcctgagtagctggaactacaggtgcatgccagcatgcccagctaattttttgtgtgcatatatatatatatatattttgttgttgttgttgttgttttgttgttgttgttgttgttttggtagagatgaggtttcaccatgttgcccaggctgatgtcaaactcctgagcttaagcaatccacccatctcggcctctcaaagtgttgggattacaggtatgagccaccgtgcccagccgagatgaatatttatatggaaagaaaaccatacaatgatgtcatataatggtaacaaatggtgagttggtgaaaatgacacagaagttctttgacttattcttgtaactgttctgtacatttgaaattatttcaaaatataaagtcaagaaaagtgaaatgaaaaagcatgcacacaacatctggcatagatttgagacattcacaagcccacccttcaaatgcgggttaagaatagctgctgagaggctgcatttattggcacagtcgggttgccagttgagcgagtgttaggtgacaaaggcgaacactgaaggcagaatgctcatgtcagatcttatccttgacttgcccgccctgcacacagtgggtgtggagcagattgctcttctcttgttgaacacaaatgaatccgttggctggcatgtggcatccatgaggaatgaaaatacatacactgaagcactggagttccgattcagagtgggaagctaatcaccctctgagggagaggaatgagactccagtcgcccatctctctcacgtgtcttggcatatgcttagtgaggggaatggcaggcaaagtctgcaccatttgcatttaaatctacgctgtgggaggctgaggtgggaggatcgctcgaggtcaggagttcaagactagcctggtcagcatagccagattcccatctctacatttatatttttttaaattcttttttctttcttttctgttaattaattaattaattaatttatttatttattaggcagagtctcactctgccagccaggctggagtgcagtggcacgatcttggcgatctcagcgatcttggctcactgcaacctcctcctcctgagttcaagcgattctcctgctgcagaa[132 bp omitted]cgaaaccccgtctctagtaaaaatacaaaaattagctgggggcctggtggtgggcacctgtaatcccagctagtcaggaggctgaggatcacttggggaatcaaggctgcagtgagctgagattgcaccactgcactccagcctctgcaatagagcaacaccctgtctaaaaaacaaaacaaaacagtagagagtacacttgccgatacaaaaatccagaagtgcaaaagggcatttagaagtaaaaagccccagccatccagttcccctctccataagcaaccctgtcagccagaatgggctatgctaggctgcagtaacaagtagccccaaagccctggttgttaaagcaacaagagtttatttctcattcgtgctacatgtgcatctgcggctggtggagcccctatttggcatcatccttactctggggccctggctgatctgcctgggactcaggccagcagagcagctatgacctgaaatatgccagtgcccatggaggagggaaaagacagagcatgggagaaccacaccctgtctctcacaagcttctgcctggaaagatacttctgcccgcacttcataggccaaggcaagtcgcacgggcacagctaacttcgggggcagggaaatagaatcctaccatgtgcccaggaggagaattggaaatatttggtgcagcaaatttatatacagattctgttccccgctccttttacacaaatggtagcattcatgcacactattctatatcttgctttcttacttaacaataaaccttggagactatttcacactgggtgatgtgggcaacatccaaggcatcctcattctcttttatacagcttacttgcactattaaatttctgtttctctttctatatatacagttgggtgcagataagttaactatacttatggcataatgtccttctattattagatgaaaaaagcaggggccaggtgcgctggctgatgcctataatcccagtacttcgggaggccaaggcaggagaattacctgaagtcaggagttcgagaccagcctggtgaacgtgatgaaacctggtctctactaaaaattcaaaaattagctgggcgtggtggcgcatgcctgtagttccagctactcaggaggctgaggcacgagaattgcttgaacctgagaggcagaggtggcagt[183 bp omitted]tggtgaaaccccatctctactaaaaatacaaaaattagcaaggcatggtggtgcgcacctgtagtaccagctactagggaggctgaggcaggagaattgcttgaacctgggaggcgggggttgcagtgagccgagattgtgccactgcactcccgcctgggtgacagagcaagactccatctcaaaaaacaaaacaaaataaaaaaagaagtaaaagaaaaaagaagttacagagcagtctatatataggaaggctgatttgtaaaaaaaaaaaaattgttttcatgtggaaatttctagaagaaaacatagctaatgtaaacagcatttgactctaagcagtgagaaatcaggagatctccattttgttatctccttctctggattttctaatttttttttcccctataacaatcactgtcattgtgacagtgcacttggttgccaggaacagaagccaagagaggtttgtgggagaactgagggacttccatgggttcacttgttcctcaagaacaaggaccttgtttgtgccgttcactgtattttgttgactgaattagtgaactggcatagcagaaaataaaattcaaccgtgccccttggagtctcaaactggggatgggtagttgctgcctcatggtatttttctacctctcttttatctgtgtctctccagttctctttccagagtgatgcgcaaacaaaccctcagatgcaaggtgaaagcctgaagcttagagacaaatatttagttgcatctagggagaattttcctaaagttcgtaaaattggtacatagaggaacctcccctcctggccagagtctgcatctgagcactaaggtaaggaggcaactctcgtcagcactgtgcaaatgttttaatgcactgggtgggaaagggaagcaggcagggagaatgcttcctttttgtattttttatttttgagacaaagtcttgctctgttgcccaggctggaatgcagtggtgcgatctcagctcactgcaacctctgcctcccgggttcaagtgattctcctgcctcagcctcccgagtagctgggactacaggtgcgcaccaccacatccagctgatttttgtgtttttagtagagacatggtttcaccacattggccaggctcgtctcaaactcctgacctcaagtaatcctcccacctcagcctcccacagtgctgggattacaggcgtgagccaccacacctggctattttttacttttgagacagggtctcactctgcccaggctggagtgtagtgatgcagtgatagctcactgtagccttgaactcctgacctcaggcgatccacctgcctcggcctcccaaagtgctggaattacaggcatgagccaccacacctggcctatttttaaatttttagtagagatgaggccttgctatgttgcccaggctggtcttgaactcctggcctcaagcaatcctcatacctcagcctcccaaagtgctaggattatggttgtgggccaccatgtccagttggaaaatgcttcctaattgtcataaaaatggacacttcagtggacatcaccatgccatgcctcctcttatgggtcgaattatgtctctcaaaaaagacgtttgagtcctaactacccagtccctgtgactgtgaccttatttggagagagggtctttgcagacgagcaagttaaaatgacgttatctgggaggctcctaatctaacgtcatcagtgtcatcataaaaggggggagtttgggctgggtgtggtggctcatgcctgtaatcccagcactttgggaggccgctgagggcggatcacgaggtcaggagttcaagaccagcctgaccaatatggtgaatccctgtctctactaaaaatacaaaaattagctgggcgtggtggtgcacgcctgtagtcccagctacttgggaggctgaggcaggagactcgcttgaacccgggaggcggaggttgcagtgagctgagatcgtgccactgcactccagcctgagtgacagagagagactctgtctcaaaaaaataaaaaaaaagtgtggggcggcatttggatacagagacagacagacacagagggaagactatgtgaagacagggagaaccgcagctacaaaccaaggaatgcctaagataccaaccaagcaccaggcctgagagaggcctgagcagatcccctcttgagaaagaataaaccagccctgccacctcctttttaccttttttgttttttgaggcagagtctcactctgttgcccaggctggagtgcagtggtaggatttcggctcactgcaacctccgcttcccaagctcaagcaattctcctgcttcagcctcctggttagctggaattacaggtgcctgccaccacatccggctaattttttttttttgtatttttagtcgagacagcgtttcaacatgttggccaggctgatctcaaactcttgacctcaggtgatcctcctgccttggcctcccaaagtgctgggattataggcatgagcccctgcacctggccggcctgccacctccttgatcttggacttccagcctccggaactgtgagccatgaagttttgcaaaactagtacaccccacccacacccctacgctttaatgctattcggccaaataatttgaatataaggaggtgacctctagaatctacaaacaaatgctcacatgctcagaggacagagggctttgttaggacaaaacccagaacttagaagcaccttacagtgcacccccacatccatcccctgacccctcagctaggtggtgggccctggcctgggaacaaatgcttcaagcccaacctttggcaaattgcccacctactacacccagctacacgtttgaggccagggggcctcccctgtgacccataaacgtgggtggaaatccatcctttctccacagtaagccttgagaccttcgatcaggaaaatgtctatttattccaaaaaataccaagtcgcagctcctctggctgtcctcaccagggaattaattaggggaaggggccagtgttggagagggggtggagagaggaagtgatgaggagggaggcagaagctgttggagggtcttcaggtgtggaactatttatcttctccctgtgaagtgccccctcccatgctcccccaaccagacggggagatgcctgtgtgtgtgtgcttgtgtatgcatgggtttgtgtgcatttgcatttgttggggcatggggaagtctcagatgacgaggtcccagctcaagacatgtggaggggaattgtcagtacacacctgctcccacccctcaagacctctctcctctatggcttatttgagatcaaatcaaggccccagggtcaggcagcctgtgccaactgaatagggacagggctaggggtgggatccctggaatccaggctgggctagagctagtggaggggggataaaaaagctgaaaggcccagacccccaaatcccggcagctggagaaagctgagtgttccgcggaggtgttgagcagaggggagggggctgggagggggtgggtgctcaagctggctcctttctggggaagtcacagttggcctgagcagtgcggggctggggaggccctggaagggatgggaggagcccctcagagcagctagaagccgtggggttgaaaaactggcaccagggcccaggtggatttgggtaacccccatttcctcagtgtggtgggaaccaagggccagttgtctgccccaagctcctgacaagaaggagtgtgaggtgccagtgtttgcggggagacataagagggagggggacggcccaggggaggaagaagaggccccccccacctcgccctaggggctgggggaggggcgtgtagccctttaagagtgggggaatggccgcccccgcaacatggctatgtacaaagagaattgagggaagattgtgcattgggtgctggggacttcctgccacccccggaggctccccgggtgttaaggtgttagggagggaggtgaaggagcacccctggtcccgcagatgtgctggcagggaccattgctctccagtgtccctgctgcaggatgaggccagcagaagacagcactgaaggccccagtcggtcaccagctttgacctatcccgcgggggtcagggatctctgaggagaatttggccggggccagtggagtgctgatcctggtaggggcccaagtgacagggattgggcagggggcagtggcgtcacctgagggttgaaatgcttcctctctggtgataatgagaggttgctgggttgaccctgtcaccaatcagatggctgggtgagggacagcgctgctgtcaggaggggcctgggtgcctcaccggggggtaaggtgaggttggctgaggccacatctgtggtgggattgatgcaggcatcatcctcggtcaggagtgaggcagtgacataaggagggccagagtaggggtgaagtcttcagagggggacagctggccccacccctgtccttttagtggaaacgggaatatggcctgttgtgctggttccccttaagtgaacaactgtaagtaccatgcggccccagaggacaactgaaatacagcccgtcacggtacttggctcctaagatgatggctcttgggggatgatggcacatggttgcagtggactctgggatgacaccagggttatggtggatcctagtgggtggtgacagcactggacctcatggatcctgggagatgataacaccagggtcatggtggatcctaatagatggtgacaacactggacctcatggatcctgggagatgataacaccagggtcatggtggatcctagtagatggtgacaacactggacctcatggatcctgggagatgatgacaccagggttatggtggatcctagtggatggtgacagcactggacctcatggatcacggatgatgacaccagggttatggcggatcctagtggatggtgacagcactggacctcatggatcctgggagaagatgacaccagggttatggtggatactagtggatggtgacagacagcactggacctcatggatcctgggagatgatgacaccagggttatggtggatcctagtggatggtgacagcactggacctcatggatcacaggagatgatgacaccagggtcatggtggatcctagtggatggtgacagcactggacctcatggatcacaggagatgatgacaccagggttatggtggatcctagtggatggtgacagcattggctctcgtggatcctggcaggtgataacaccatagttgaagtggatactgggaggtagtggcacatgtttgaatgaaatcctgggaggtggtggcacatggttgaagtggatccctggagatgatgacaccatgcatccctgcaaatgatgatgacactattgggcatcatgggtcttgggaggtgatgacaccaaaatcatgagggattatgggaaatggtggaatcatcagtcctagtggatttcagtagaggatgtctctgtcaggtgtagtggattctggaaggtaatgtcatcactggtcatggtggaatctaggagatgatgacaccgtcagctgtggtggctcctgaaagatgatgacaccatggttgtgaggaatcatggaggatggtgacaccattggctatggggagtcttggcagatggtgacaccattagtcatggtaaatcctggaagaagatgataccatagttgtgggtcataggtaatcctggggaaggattccatcctcagacatgggtaacacttgaccccgggtgtggtgccatcatgagtggcgggtgttgtgtgatgctgacagtgtcagtgagggcaagagtaggtgtaccccaagcacctccccccagtagaaggctaggactttgttgacagaggtgattgtctctagatatggcagaaagaaaagtgaggccaggctatgggacacctatgagtgccagaactccaggatcctggtgatccagagtggcctcctgggagcagaaggccatctggaggtcctgtctcccaggagtcatggcacagatgtgggatccaaggccccatttcccctcagagggtctggcagagatcctgctggacatgtccctggagtctggggagggagcaaccaagctaagtcatggtgggacaaggcagtaactctggtgacaccaccaataccgatggccttccagagtgggcagtgcctctgaggaggaagctctggtgatgccatcacagcattgggggtaggggtgtcactgccaacagcctacacagaccatcatctctggaggaggccctccacatgggcggctccccagcgatgcttccttcagacaacatctcaggacagggcccctctctgctctctggcatcttccctggggtggtcctggactctgggcctgccctgccttctacaacatggtggcagcagtggaggcatctctttgtgccatctcagagcacatagcatctgggcgacatcacagaagggacctcctcctggagaggtcccagagtgggtggtcatctctggtgatgacatcacaggaagaggcacggtccctctgatgacgtcatagggcaaggcaccttctctggtgatggcatcacaggaaggaggcagggtccctgtgatgatgttgtgaaaaggggaccttatgtctagtgaggacacaatcggtgaggcattttcccctgcgacgtgtcccaggaagatggctttgtctgtaatgatgacatcataggacagaggcatcttctctgctgcaaagacacagggagaaaatatcttccccatggcgatgatgccaaaagaggccttggagttagagatgacatcatccaggtgagattgtctctgcagtgacaccacaggaaggaatgtcatggaacaaggcgtcgtctctgttattataccacaagaaggaagcctctgaggacaccatagaacatggacatggcctccagcgctgacctcacgggccggcctcttcctctgtgatgacctcatgggaacgaggctttgtccctgtgatgacatcacagaacacagacatttttgctagtgatgacctcatgagccggcctcttcctctgggatgacatcatgggaaggaggccttggctcaagcagtgaagtaataggaggaggaatcttgtctgccaggacatcccagaaggaggctttcactcctgtccaagggccgatctgggccccaggcccctggcatgtgtgcgcctgtgtcgggggatccaggctgggacggggggcccgggaggccgcagccccccagacccggccctggcctcagacagtcacctcgttcttgctggccgtgcgcaggtgctggggcaggtggtggcccgggatgaactgcagctgctccagcgtgccctggcgctggaagggcggcctgcgggccagtgtgcccccgcccccgccggcgtcggacatccaggccggctgcggcgagccgtgcagggcgtggtggtggtgggcgtgcaggctggacggtggcggcagcccgcgcagcggtgttgggggccccccgggccccagcagcaggttggagtgcgaggcggccaggctggcccgggcggtggggtcggggggcagcgcggggctgcgcgggggcgacagcaggtgctcgcgactctggcgcagggcctcgggcgaggacagcagcaggtgctcctgcgacaccaggcgcgcgcgcggcagcgtgaactcgtagcgcgaacggccaccatcgcccagcaggtgctcctgggacatgacccgccgggggttgggcgcgggcgccaggcccagctcctctgggccgccccaggcctccatgcgatagccgccccccgtgcccggccgccgcagcgcgtgcaggggcagcgtgccgcggggcaattccaggggccggcgcttcaggtaggcctcgtccagatccttctcggctgcggggagagggggaaaagccacagccgtgggtcccctgcgcatctagagccctccccctcccacctcgtcacatcccgctcctatgctccttgtgcccccacaaggatcctgggcatcaggctagctgtgaggccaaaatgcagattcccaggcccagcccacaatgctgggtcagtagatgtggaggacttcctcttcttcccccccgcgccgcctatcccttcttttgggagtagaacccaactcttgcttttggggaaccactgaccccctctcatcctgtagcaatgtgattcacacttggagttgtgacctgttaggttgtgaagttgattttgcgggtagtgagcagcattttgaaaaatgaaatcaaatagaacagaagagaaaactatcagaaagtgtttatgtaataagggaatcaggggtaagtgttggttcataaaattcttactgcagacgcgtgtgtgtgtgtgtggtgggtgtgtggtgtatatgtggtgtgtgtgtggtgtgtgtgtgtggtgtgtggtgtgtgtgcgtgtgtggtgtatatgtggtgtgtgtgtgtggtgtgtatgtgggtgtgtggtttgtgtgtggtgtgtgtggtgtgtgtgtatggtgtgtgtgtggtgtgtgtgtgtgggtgtgtggttgtgtggtgtgtgtgtatggtgtgtgtgtggtgtatatgtggtgtgtatgtggtgtgtgtgtggttgtgtggtgtgtgtgtggttgtgtgtgtatggtgtgtgtggtgtgtgtgtatggtgtgtgtgtggtgtgtgtgtggtgtgggtgtgtggtatggcgtgtgtgtgtggtgtgtgtggttgtgtgtatggtgtgtgtggtgtgtgtgtatggtgtgtggtgtgtgtgtatggtgcgtgtgtgtggtgtgggtgtgtggttgtgtggtgtgtgtggtgtatatgtggtgtgtgtggtgtgtgtggtgtgtggtgtgtgtatggtgtgtgtggtgtgtgtgtgcgtgtgtgcatggtgtgtatgtgtgtgtggtgtgtggtgtgtgtgtgcgtgtgtgtatatgtggtgtgtgtggtgtgtgtgtatatgtggtgtgtgtggtgtgtgtgtatatgtggtgtgtgtgtatatgtggtgtgtgtatggtgtgtggtgtgtgggtgtgtgtggtgtgtgtggatggtgtgtatggtgtgtgtgtggtgtatatgtggtgtgtgtgtgggtgtgtggctgtgtggtgtgtgtgtggtgtgtgtgtagtgtgtatggtgtgtgtggtgtgtgtggtgtgtgtgtatggtgtgtgtgtggtgtgtgtggtgtgtgtggtgtatgtgtatggtgtgtgtgtgtggtgtgtgtgtatggtgtgtgtggttgtgtggtgtgtatgtgtgtgtggtgtgtgtatggtgtgtgtgtatgtgtgtgtgcgtgtgtgcgtgtgtgtggtgtgtatgtgtgtgcgtgtgtgcgtgtgtgtatatgtggtgtgtgtgtatatgtggtgtgtgtgtgggtgtgtgtggtgtgtgtgtatggtgtgtatggtgtgtgtgtggtgtgtgtgtggtgtatatgtggtgtgtgtgtgtgggtgtgtgttgtgtgtgtgtgtgtgtgattgaaatattaaaggatgagatttagtttaaaagaatccatcaaggtcagatgaggtggctcactcctgtaatcccagcactttgggtgattgaacaggagggtcccttgagcccaggagttcaagaccgacctgggcaatatagtgagactccatctctacaaaaaaaaaaaaaaaaaaaaaaaaattagctaagcatggtggctcatgcttatagtcccagttactcgggaggctgacgtcggaggattgcttgagtccagaaagttgagcctgcagtgagccatgattacaccactgcactccagcctgggcaaaagagtgagaccttgtctcgttaaaaaaaaaaaaaaggatccaccaaaaagtggggtggagggaggatagattaacaaaatgtggctaattattaaggctgagtgatgggaacatgggactcattttataattttctctactcgcatgtatgtttgcaaatgtccgtaataaaaagtttcaaagatttcctgtaattaaaaatatacacatgtgtgtgtgtgtgtgtgtct[132 bp omitted]gaaaccccgtctctattaaaaatacaaaaattagccaggagtggtggcatgtgcctgtaatcccagctactctggagactgaggcaggagaatcgcttgagcccaggaggcagaggttgcagtgagccgagatggtgccattgcactccagcctgggcaacaacagtgaaactctgtctcaaaaaaacaaaaaacaaaatgaaacaaaacaaaaaacgccgggcatagtggctcacgccttaatcccagcactttgggaggc[134 bp omitted]aaggcaggagaatcacttgaactcggcaggcggagattgcagtgagccaagatcatgccactgctctccagcctgagcgacaagagtgagactctgtctcaaaaaaaaaaaaaaaaagtttctggctgggtatggtgggtcactcctgtaatctcagcactttgagaggacgaggtgggtggctttcttgagcccaggagtttgaggccagcctgggcaacacagtgaaaccccgtctctacaaaaaatacaaaaattagccaggcatggcagcacgagctcttagttccagctagccaggaggctgacgtgggaggatcatgcttgagcctggggaggtagaggctgcagtgaatgatgatcatgccactacatcccagcctgggtgacagagtgagaccctgtcttgaaaacatagtggtaataaagaagaaaaagtgtttcctagtgaagctctcagtttaagatgtttgaaggctgctccactgtcagcaatgggccacggactgcagaatgtccaatgagagtcacaggaatgggttcagggatgggcatgtgacccagcttgcaccaatggcatccaggcctgggattttttgccggaattgttgggagagactcttttctgccagggtccctgagctggtagaacggcagcctgaacatctgcagggtggtcgttgccaccacgaggggagactctctgaaaatgaggcccgccggtggcgtagagagctaagagacagctcttgagcccccaaaacagccacatcgcaatctggtgacctgtagattttccatgatcaagtcaacatgtttttttcctttagctgaagtagtatttctattaattgcaagtccaagtcctgatgaacaccataatatgtcctgggaggggagaccagaaggttgcattaaaaaaaaatcagaagtgattctgatacaaaagtaccacaggtaattccagaacgaacttggagtaaaacctgggagagaagctaaaccattggaaggctcttgggccactgtccacggtcctgaacccaggctctggccccgccccctccccttcaccgccgcgctgcccttgccaggactcacccagcctcttgagggaagagtagcggttcagctcggatttcacggcagcctcgtaggacgggggcagatgcgagaggttgtggaaggaccgagagcaggacagcgtggagtagtgcaaggaggggctgggcggcggcaaggctcgccagtctgggttagagggggcagggccagggtcagtcagcttcctccctcagacccaggagtccaggcccccagcccctgctccatcagacccaggagtccagaaacccagcccctcttccttcagacccaggagtgcaggcccccagcccctccacctcagacccaggaattcaggcctcagccccgcctccctcagacccaggagtccaggcccccagcccctcctccctcagacccaggcgtccaggcctgcagcccctcctccctcagacccaggcgtccaggcccccagcccctcctccctcagacccaggcgtccaggcccccagcccctcctccctcagacccaggatccaggctcagccctcctccctcagacccaggcgtccaggcccccagcccctcctccctcagacccagcagttctttggggagttagaaatctgagattgtagcccatcagttccagcagttcaggctccctcttctcaccccagcccctctgctcaggagacgggcttgatgctggggaagagggccccaagaggggggtactgggcatttgtcagcacccactgagtgcctggccccaggctccatcaacaatgtgggagagagatgaccacttttggcatccacacgaggaaacaggctcacttggtgacctggccagaccatgagcgccatgaggactgggctcacaggggtctcactcctgctctatactgggcacctggcatggctggcccaacacaaagggggaagggaaggaggcctgctcttttccgcagccgggccctcttccgcacccagtgtggcggcgtggtgcttggggctgttgacgttgaggtgcaggtagctgtggtgcagattatctggggggaccgagaagggagatgatgtcactgccatcactgactcccagctggcaccgtggccctgatctctgggaaggactctggccccaaggtcggccccacatgcaggacctcgttagagctccacagatcaacccatgccattggccacatgggggaaactgaggctgggggtcttgaaggtggaaagtgtgggcacaggctcagggctgggtaagtggtctgtcccaagttcttagcacccccccccctggtgcccaggctagagatctgagggggtcgccttgctacctccctccacctcccactcatgtccacttggttccttctgacatctgaatctctgccctgatgtgtcctctccctcctggatcaccaaagcagcctctggccatccagcccatccatctccatgatcagcctcaccgaggtaactgcccttccactgctcaacagccttcccattggctcaccatcacccacgggacaaagttgaacccaggaatggtgtttgaggcttcaaaacctggacccactggatgtctgcagccccatctcccatcccttccctcaagccgcactgctctctccagtgagcccagcgtggtcctgccacagggcctttgcacatgccaccatgctgttctcactgccttgaagcccttcttcccatctgcctcaagatccagctcagatgtctcttctcctctccacccctgatcccagctccgtccttgtcctcttgctgcctggaccatcatcccagcctcctcctgggcctctttcctctcatctctgccctttgcatgggttccagaggaccggttctaccacccactgctggctgtgttgctcctctgctggaactcctccgcagctctccatcaccctcaggacggaggcggagttcctcagcccagcctggcgctcaaggccctctctgaggtcaccaaccaccctctccctggcctcaagtctggtcacctcacaagctctgccacctggagcttcccagccccagtaactcctctcctcctccaggcctttgctcaaatacctctccctcggagaagcccttctgacgcctctcctcctccaggcctttgctcaaatacctctccctcggagaagcccttctaatgcctctcctcctccaggcctttgctcaaatacctctcccttggagaagcccttctaacgcctctcctcctccaggcctttgctcaaatacctccccctcggagaagcccttctgcccccaaaccagaccacatcttctcagttcccctgacagctccttggacctctccactgatgcattcatcataaattataataatatagatcatatttaaatgatatacaatattaaatatgatatatcatattttaaatatataattatatatatttaacaatagcaacagcccacacttacatagtatttttttctgtgttacacattattctaatcacctgcctcaccaattcatttgctcttcaccataaccccatgaagtgagtattgttatgtttcttattttatggatggagaaactgaggcccacagaggtgaggtcacttgccccaggtcacacaatggcagagtcaggattcaaacccagtcggtctggctcctgacaaattcgaatttggtagttgtgcccttgtgtgtagttggctgttaggtggtctgacaccgagcgcaggggcttgagaatgtctaaacctacatcaccaaggtgcccatggagccccacccaggggggtccacaggagggcaaggagagggtctggctctctacggagttcctagcccccgtccgcctttcgcagggcaggacccggcagtgcaaggcgggcgtagggggtgagggcgggtcctgggcgatgggggtggagccgccatggagggcggggctacatgatgaaggggcgtggccagagacggaggctgcgccggatcccacgttccactcaccgaggttgggggtcttcacggtgttgtagaggttcttgggcgtcctggggggcatgctgtcgggaccgccgatccccggggtcagggagctgcttcgggcccggtccgggcgggtcccaggccccgcctgatgtctcagaatgtccaccagagctctaaaggtggcagagaggtggtcaaaggcctgggggctgagggtggcaggggtaccaggaaggcttctttccgctccctgctctcgcccttgggtaatctgtcactcagcctgcctttttcgccattggccacgcccctttctcgttggccacgccccctagaatgaccccctttctcaggccacacttcctgcttgaagcgctgctgccttaactcgtgtggaagccatcgcttctgtggtccctctcacttccctgtgggctcgccccaccctgaatctgggaccccattcccgttccttttgcagccttccccatggcaacaaagggtgctccatttacccagtgatgcggacctcaaacattaaatcaccttgactcttctttcccccaccttcatacctttcagcaatcctacggatcgaacctccaaaacatatcccaaatcagaccactactcaccacctctgcaatctctcacctggatcattgcaacagccccctcacgggtctccccactcccaccctagccccgtacactccagtctcacgcgcagcccgcataatttaaaaaatggacagatggcatcacgcccgagctcaggaccctgcagtggccccatcacacttaggataaacccgggcccgcctacttctcctcacctcctgctgcccaccgccgccagctgcacgggcgcttccctgccctgcaggccaccgagggcctttgcacgcggttcccctgcccaaaacctctcgcccacagatctctgcgtggttcgctccctcccttcgggtctccgttcagaggccttttcggatcacttcctctaatccagcgccctctctctcaacactttccgctgattttcttcacagcagtcatctaaaattacactgcacatgcttacggactgggccactgatagttaatgagcccttaccgtgtgccaggaccctgcacgaatcaactcagttaattacaatccgaataggtggggacgatgattagtctcattgtgcggacaggaaactgaggaacagagacgttaagcaactcatccactgtcacatagcctgtaggctgtgaacttggatttggaagtcaggcttttccaccagggcagagaccttgttttgttcactggtgtatccccagctcctggcccacagaaggtgctcaagaaatatgtgtcgaatgaatgagagtctgggcttctccctctccctgcatcactccgcaacagccgggccggctctggcgcgactttctcagcccctgcccaccttcagctacgccggcggccgccacctgggtctctgaccaccacgccctatccctgcagcccctcctcctcggatggctccacctcccttgctgggccccgccccaggctcgcagtcctcccgcccgagagcacacgcacctgggcacgttgatatcccggtgcgcccggggcgcacgggacgccttgctgaaggccactttggcgccgacgcccacggccagggcgaagctgatgaccccgcacacgacgtaggctgtgctgcccccggggccctcgcccccgcggcccccggcacccccagtccggcccccttccaaccacccggcctggccgggccctggccccccgcccgcacccccagcgcccccggcgcccccagctagcggcggcggcgtggtggcccagcgcggcgtgtcgtagttggagcaggaggcctgcgccaggcgcatgtgacggtgctcacagcagaagcggtagtggcaggtgccacagcagaagcggtaggagccggtgctgcagttgaaggtggcgtcgtactggcccatgacatcgtagtagccgtggcagagctcggcgggagggggcgcccgggccgccgcgcccgccccgcccgcggggccggtcctggtgccgttggcgcctgggctcgccgcgcccccgccgcccgtcagcgccccggtcaggcgccgcaggtgcgccagcagggcgggcagcgggcccgcgggctcggcgctcgtggcgttggacgggcgcgccctggcctggccggcgctagaggccaggagtacgaggagcaggagggccggcatggggcttgcagggggtcgcactgggccgccaggctgcggggagaacgagagcagaggttggagcgctgggcgggagagaaacggtcagagggtgagaaacgtagagatgggtgggcagagaggctggggagggcgggcggggggcggcagagtgtggggagcaacaggcgccaggaggcaggaagggcggagggagctgagctgcgtgggcccaagttggccgccccacgcgcggtgggcgacgatgggagagtaatggaaacgcgcccgggcacggctgggggagagaaatgagcatgggcggacagaaccgggatcaggcgagagatgaatgcgggagaagcgattgggagggtcgacagacaccagaggggtgtgcagacattaggacgaggagcgaggcgaggcgcgatgtaaggagaagaaacgggggcggcgaagaggagagggcaggggaggcagctggagggaggcgcgcgaaggggaggggagggtggcgaggggagtggggaccgcggagggagggaaggaagcgagacagatgaggggtgggtgggaaaggaggagtcagggagacggggaaggagggagaaaagaaggggaggaggaggagggggaggagagggagggaggaggagagagagaagttgagaatttgagtttatagaccaggcaagtgggaagaggcagtgcacggtttttcaacactgacattcggggaccgatgctgctttgtggtgagcgcctgtcctgagcgctgtaggatgtttagcagcgccctctccatgccagcagcaccacattcccccgagttgtgacaatgtaagatgtttccaggcattgccaaatgttcccctggtgggaggaggccacagctgcccccgtggagaaccactgacttacacccctatggtcctcagtgccccgaaatgccaatttctctcccttagttagatctgataatcaagggatcttaggtgccctccctccctccctctctctccctctctctctctctctccctggcatgcacacgcacacacacaccactgttacggcgtcgggtttgaagggtctctgtccacagctgaaccacaaccacagcagggtggttcccctgccgactggacctcctgccagctgcctgacactgacaggctcttatctaagctccctgtgccccaagtcccccatctgtaaaatggggataaggatggttatctctgagtggtcaggaggatgaactgagggaatatgtgtaaagagcttagaacagtgcctggcatattgcaggtgaaatatgaaagtgtttgctgctgctgctatttcagaagggagatacaggctgagaaagggtcgtccgggtgcggcggctcacgcctgtaaatcccagcactctgggaggccaaggtgggcaaattgctcaagcaggagaccagccagcctcgccaacacagcaaaaccgtgtctttacaaaaaaaaaaaaaaaaaaaattagcccggcgtggtcgtgcgcacctatagtcccaggtactcaggacgctgaggtgggaggataacttgagtcccagagatcaaggctgctgggagctgtgatttcaccaccgcactccagcctgagttgacagagtgagaccctgtctcaaaagagagagaaaaggtgatgcagaagagaggtgggagttggtggtggtggtggtgggcacgtcttccagctgtttctatggcaacagtccagccaagtcccagacacgcccacccccgtggacctagagggatgatagaggtgggaaggatgcctggcctcgggttccgggagaaggaaacgtctgagctctacctgcaggaggaaccccccaggggtctggggtgactgcccacggagtcttacatttcctctctgcaagaacctgatctgaacagcccctgccctgagctagctgccgagaggctgccatagagcttcccaggagcaggcatgatgcgcggggtgtgcattcgttctgcaaatcttcattcaataaatgtctcctgagcagcctccctgggctgaggatgcagcagtgagtaagcccacagggttcctgcctttacgggggtttacgtgctagtgaggggggacagtcagcagatggacacaaatgaatgggacacatgttgacgccaattgtgaagaaataaaaaggaatgatgaaggaagccgtgaagaaatgaaagcagcataaagggatggagggggtggatgggattgagtcaataaatatcactcggtgttattttctattatatgccaccatccatcgtgtgtgtgtctagggaccacaccactgtcaacaacattgctgctggtggggatgggcagagggttggaaggtgaaccttccagagcctcagtgagctccatcgccctcctgcttggggcctcacctttccttttcagctccagcttggacccctcccctgactcggtgctagaataccccactgcccactggacacttcctcctgggtgtttaatgggagtcttagaagtggcttgaccccacactgt[132 bp omitted]acttgcaagaccagcttggccaatatgacgaaaccccgtctctactaaaaatacaaaaataactagccgggcatggtggcgtgcgcctgtagtcccagctactcaggaggctgaagcaggagaatcgcttgaactccggaagtggaggttgcagtgagccgagattatgtcattgcactcactgtactccagcctgggcaacagagtgagactccgtctcaaaaaaaaaaaaaaaag[147 bp omitted]gtggcgggcgcctgtagtcccagctactcgggaggctgaggcagaagaatggcgtgaaccccggaggtggagcttgcagtgagcagagatcgtgccactgcactccagcctgggctgacagagtgagacgtcgtctcaaaaaaaaaaaaaaaaaaaagaagttaactaggattaccatgcacttccactctgcagtgtctaccccaaagaattcaaaacatgtgtccacacaaaaccttatccttgaatgttcataacagcaccttgcacaacagccaaatactgcaaacaatgcaatcacccattatggaggaacggacaaaccaacgacggcctacccatgccacagaatattactcaaccgtgacaggtaccaagggctgagatacaagccacagcatgcacgaaccttgaagacatgacgttcagtggaaaagtccagccataaatctcatgtagtgtatgatttcattaatatgaaatatcacaatagtcaaatccacagagactgaaagccgattaataattgcccggagctggggacaggaggatggggggtgaccgctaaagggtggccaggcttccttgtgtggtgaggaaaataccctggaactaaatagtggtgatggctccacaacctgatggatacgctaatgccaccgaatcaaacactttgagaatggtt[139 bp omitted]gaaacactgtcactactaaaagtacaaaaatgagcccggcgcagtggcgggcgcctttaattccagctactcgggaagctgaggaaggagaatcgcttgaaccccggaggctcaggttgcagtgagctgagatcacaccactgcactccagccagggtgacagcgtgagactccatctcaaaaaaaaaaaaaaaaaaaaaaaaaaggaaacacgtcaaatggcatcaaccactcccctgtccgcattctggttccctgtcacacctggaataaaaccccaactctgccagtagctcctcttctcatcctttccttttcccttcataccttccaagttcatgctcaagacgctccaccttcctgcctgtgcacgtgctgtttccttcgtctgggagccccttcctttccacagatcctgctctgacctgcctcctttctcccttccttcagggtgtccctagcatgtcatttcagccagccttcctgtcctagcggtaacagcagccccagacatgctcccaattcctcacttgctttgcaactttcatagctgtcatctctgctggccacatgtgtgtgtactgacacactcatttcagatgaggacgctgaggttccgagaggtcacatcatttgcctgagacccaaggtgcccaaagagtggggctgggctttgaactcaggtctctgagcactgtgacctgtacagcatggatgcctttttcccccacacagagacacatcccttccagaagtggcacatgcatgcagcactgcagattccttcattcattgagggctaccatgtagggttgggcaggtcgtgcactgcacaagggggtctggctgagaggctgaaatcctgctgggctctgcttcccagggcgtgtgccagtggggctgcatccatttggggtaaggagtgccccttccaagctcacacaagggtgccatctgcgtgccaaaccacagacctgggagagcggattgggcaaggtggggggtgcctttgtctcatctgcacagaggctgctgtatgggctggcagttctgctcactccgcattccgtgccaagcctccgccaggctccatggacacgatttctccctctgctgacagagtcccactggctgctccaactgcacgcacgtggtgcacacacccaaggagacacagctctaggccattgacaactccagcagggggacagggagggagagcaggagcagtggcgcacctcccctcaaactcagcgatacacgcagacgcaccacacacagaccacacatacacacacacacacaccacacacaccacacatacacatacaccacacactgaccctccacaccacacacgccgcacagaccacacatacacacacacaccacacacacaccacacacaccacacatacacacacacaccacacactgaccctccacaccacacacacgccacacagaccacacattacacacacacgccacacacacacaccacacactgacccccccacaccacacacacgccacacaggccacacatacacacacacaccacccacagaccacacaaacacacacaccacacatacacacaccacacacacacacaccacacacaccacacatacacatacaccacacactgaccctccacaccacacacgccgcagagaccacacatacacacacacaccacacacacacaccacacactgaccctccacaccacacacacgccacacagaccacacatacacacacacgccacacacacacaccacacactgacccccccacaacacacacacgccacacagaccacacatacacacacacaccacacacacacaccacacacaccacacatacacatacaccacacactgaccctccacaccacacacgccgcacagacaacacatacacacacaccacacacacacaccacacacacaccacacatacacacacaccacacactgaccctccacaccacacacacgccacacagaccacacatacacacacacaccacacacacaccacacatacacacacacaccacacacacacaccacacactgacacacgcacacaggccacacatacacacaccacacacacacacacaccacacaccacacacacacaccacacactgaccctccacaccacacacacgccacacagaccacacacacacacacacacaccacacactgacccccccacaccacacacatgccacacaggccacacatacacacacacacaccacacacaggccacacaaacacacaccacacacacacacacacacaccacactgaccccccacaccacacacacgccacacagaccacacacacacaccacacgcacacacaccacacacagcttctctacccctcctggtcagggcagcacctataggtgggtggagagaggacgtgcacctgcagacacagcggccccatccagacactggatgaattcttccctgacctcacacaaagctgcgcagagacactgccgaacacgctgacacagagcacagggcacccagatagtcccagacacaacacgaaaggacctggtggcactcctgtggcctcctcccggcacacggacgcacatacacaccactccacgtggacacacaacacaaacatgggcttctgcacatttcaacccctacacactgggaccacttacagctctgggacaggaccagggacctgccccacctggctccacgtgggcccgcgaccacacacatcacagctcacagccacgcaacctcaggggcgcacacacgtgtgcaaatacaccctcaccagcaatggagagtgtggaaggcgccatgtgacacctccgccccacacccgcccccacctcggctctcacgcacacaacggcgctctcctcctccacagctgagggggaaggggcccgggaccccaggcttcacgtctgcatcttgcatgccccgctgaaccccagctcaggacctgacagacacagatgtggggacacaggtcagagagccagcctgggcagggtccctgggcttctgggagctcctcccccaccccccaccagccccctgcccagctctgtgctgcacactccacctgctgcgtcccctcccaaccctcttggctgggggctgggggccaggatcccagaagctcagagaaagggacagggatactgaaggggaaacagaggtcctgggagaggggacagagagccaaaggcagggcagattgtgtgtgtttgagagagaagggggtacagagacccagagagagggggacagagacccagatagagggacagggacccagagagatgggggacagagacccagagagagggggacagagacccagagacggggacagagacccagagagaggggacagagactcagagagacagggggacagggacccagagagatgggggacagagacccagagagagggggacagagacccagagacggggacagagacccagagagaggggacagagactcagagagacagggggacagggacccagagagatgggggacagagacccagagagagggggacagagacccagagacggggacagagacccagagagaggggacagagactcagagagacagggggacagggacccagagagatgggggacagagacccagagagagggggacagagacccagagacggggacagagacccagaaagacaggggacagagacccagagagagaggggacagagacccagagagagagggggacagagacccagagagagagggggacagagacccagagagagaaggggacagagacccagagacagggggacagagacccagaaagacagggggacagagactcagagagagagggaacagagacccagagagagagggtacagagacccagagagagagggggacagagacccagagagagagggggacagagacccagagacagggggacaaagacccagagagagagagggacacagacccagagacagggggacacagacccagagacagggggacagagacccagagagagaggggggacagagacccagagaggggacagagacccagagacaaggggacagagacccagagacagggggacagagacccagagagagaggggggacagagacccagagaggggacagagacccagagagagacgcaaaagagacgggcggggggcgggagacaaatgctcagaggggacgcagcgtcctagagaagtggggttcagagaccctgagaggagagagagccagagaggggaggacctgacctaccgaggggacagacgcccgagagagtcggcgcctctggggtctcgggagctgggctggagtggggtccgcagggggtgggtggggggctgaggggcgcagtgggtatggagagagaggccagggctgggccgggcgggcgccggtccgagtgcgaacggtggagctcctctggggttgacgggtcggtttggggtaggggtgtgcgttcaagaggaggcgggcccgggcgggtggggaaagcccagagggaaggggcgggctcttgctggagggcgcggggaccccagttccgggcgccaggggcggcggggcggggagaccctgggggctgcacgggggcgccgtgcctcgcgggccgcggggaaggcagggaccgagcgagggaggaggaccctcccccgacccgcagcccaggcggcggccggtcccggcgcccccgcccagatccctgcgccgcccggcccgcgtgcttgtctctgggtctctgcatcttcgcgtcccggggcgccccgtccacgcctcctcccggacccccgcctcccccgcccgtctctgtctctagcgggggtctcagccctcgtctgtcgctgcgggtctcctcgcatctcggcgtctctctccgcgtctctctccgtcccggcgcctgtgtcccgggctgtccccagctccgagcctcagttccctgcgcgcctccatttccctccttcccccgcccggtctccgtcacccctctgtctccacatcccgcttgtctctccttcctggctccacgtctctttctctgtcccaggtttgctgtcgtctgatctctgtctgagtgtctgtgtctccactcgcccccgacccggccccccgagccccctcccgggtcccccactcccattcaggcccgggttggtggggtgggggggcgctgcggcgggagctgtgtgttcccagcgcaaaatagactctcgttgccatggcgacgcgcgcggggcctcggagacgcgaggcttcgggcttggggggtgaggaggggggacacctggatccggaaggcgggggccgggggcgccgccgcccggtcccaggggctcctcctagatccctggggagagggatgctgggcgctccgacgctgggggccaggggaccggaccttctgggaggggtctgggctcccagggtcggcggtgggggctccgattgcccaacgcggggcgggctgactgacagctctgacgccggtgtctctgaggactcaggggtggcctctcaggtctccaaggttggggaagaggcaagggctgcaaatctggaacggaggagctctccctgggggtctgcagattccaactcctagatctgcagaattctgggagcccccatgtgggtcccggaactcctgcgtctgggggagccgggactacaatgctttcagcccttccttccatccgtccatccatccttccatccatccatccacccatccacatggctgtgtcttccttcctcccgtctccatgtccccttgcctcagtttcccttccgcacctgggtgcggtctcgctcacctcgctttccggatgcgggacccttggggagccgggggtggcggcgtggggggcggccggaggcggcggcggagcgcgtgtctgccggcagctgggctgggcgtgcgcgcgccggctgggggcgaccccggccgcagttctcctccgagcagatgcgccgcgtccgtgcagatgtgtcagccgccagccctcgcctttgcctcgcgccgagaagaggcacctccccccccccacctgctggggaccccgctttctccctcctgcagcccccagtcgcccccgggatcccccccaacccaagaatggtttggtccacagccacatatatgtttattctgcgagtccgtgtcccacagtctgagactcttcttcccctccccttcccgccccgtgaagtggcccggggccgagccccgcctccatcttggctcagccaattcccacccagtttccaggagtctcatttgcatttccgggagcagctgtccaatgggaaggcagcaccctgccccccccacaagggggcggcactcctggtggatcgcaccactcttgggatccagggatggggggaacgggcttccactgaggtccgggtgacaggagggtggtcttccctcaaggcagggttggagttcagtggaggagggagttctggccttggaagaggcccagcagtccgctgtctggggcgggctccttgatgagtttctggatctgtaagggcagggggcgatgggtcaggaagcgtctagggtcccgatctccatggatgacaaatctgagggacacctctccgtcttcatctctcggaccttctggctagcagctgcccaagacaacactccctcttctcaagacttttcctggggcctccctttcattacacgtgactggttgagctcctcactgcctgccatcttggtgtgctttgcgggcttggaccactaagggtggacagctctgtgctggggcttcctgtctacaccttcctcttcttaagtaacctcatttctcccatccctcttctgggccctcagctcacaaatccagcctggactttgcccctgaactcgactcatctatctaactgcctcttagatagacatgagcaaccaaccgcatttcatccatcagcaagtcccagcaagtttatctccagaaaataaaataaataaataaataaataaacaacaacaacaacaaaaaagcctgcatcccccctgcctcatcaccgcttgcctgggcgcccaaattaacctccttactgacaggtctccctcctcccctctatgccacactccctaatccactggtcacacagggccagaaagaactttgtaaactgccgatctgatatggccagctcccctgcatcaaaccctgatggctgcccgtggctgaaatctcaaacctctgggctctgactcctgcgtgaagacaggctgctggctcctcccgcgtggtgctcaccctggcctgctacagctcctcaaagaaagctcagtccccctcccctgggaacactgtgagtgcctgatgcccccttccccggcagctcagaattcagggccacctctgccactcttgctcatccctctgcaactcctgccccagctgggggtcacaatgtgtcactgaacatggattgctgcagactccagggctcaccacagtggctggcacagagtgggtgctcggtgaatgtcccacagagctgaactagaaggaaggtaaggagcagacctgggagggcctgggaatgtcaaggtctggggcctctccagcatcctgagggccaatggcttgaagcaggggggcccagtacctggctgaccccggtagcagggtggccagtggagtctgagaaactggaggaggggcacccgggccggaaggggcagaggcggaggagatggagagttggagatgggtgtggacgggtcaaggggcttctatctagagggtctctgctgacctgttcttccccagtgtccgcctggtcactccctccttcagttcattctaaagtcacctgctccaggatgccccccagaccctccaatacaaaccccctcctctgtgccctgaccctctggattgcctcccccattttattgttctctgtggcccttatggtccatctgtgggctcctttcatggatttatggcagtgacagtgaccagcagcctcccctccaagaacctggctccccctggaggcggcagcctgctggtgccgagatgtattctcagagcccaaagacaagacctttgacagatgcaggggaggtgggggcggccaggcgggcattacctccttgaactgggggtggacggcatcgcccacaagctgcagaatgagcccttcgctggtggagaggaaggcaccactctgtctcatgcgggccagagccaccagccggtccacctggctgtgagtgggagggagggagggaaggttggtgtggacgccgcagtctggacacccagacacgcaggcaccctggtgggaatgccgcctgtggcccttcctgggagcccctgatggcccccacgtgcacccacccaggcaggggccctctcacctgcgtgaggagcaggcgtccaccaccacatggacctgcagcccccggtctaggaggtccagggtcgtgttctgtgggtagagagaggtcagggccaaccccggataagaacgggggtcctgggtaaggaattggggatggtgagtcagaattaggggcccagaatggggaggagggaggctcggatcagaggaaggggcccccaggtcaggaggggatccaagataggatggggcccacaggtgaggagagagggcccaggtcaggatgggggtcctgcagggaagtggaggtttctggtcagggaaggaggttctatttaggatgggggtcccaggttagaacgagggacccctggggtcagtcagcatctcaccaagatgcaggcctgtgcctcaatgccacagagcagcacagagcgcagctggggccgactgtccagctcctgctgcagggcaggcaccatgctgaagcaggtcttggccagcggccgaaggccctcagtccccagctcgggcaccgtggggcccaggccttgtgggtactgctccgtcagcatgactggcacctcaagcagccgggccacctgtgccagtgatggggaagaaaggtcagggtctgagggaggaggggctgggcctggactcctgggtctgagggaggaggggctgggcctggactcctgggtctgagggaggaggggctgggggtctggactcctgggtgtgagggaggaggggctatgcctggactcctgagtctgagggaggaggagctgggcctggactcctgcgtctgagggaagaggaagtgggcctggatccctgggtctgaaggaagaggagttgggcctggacgcctgggtctgagggtggagggctgagcctggatcctgggtctgagggtggagggctgagcctggatcctggatctgagggtggagggctgagcctggatcctgggtctgagggtggagggctgagcctggatcctgggtctgagggtggagggctgagcctggatcctgggtctgagggtggagggctgagcctggatcctgggtctgagggtggggggctgaggtcataccttgagcatgcgggcagccactgagacgatctgtgggaagtaggcgatgttgtggcggaacttctcctgcatgtcacacaggaacaggacagaggatcctgggaggactcggcccaggctgggcctggcagccgccattttctgggggtgggcagagggacggtgggtcaggcccgagggctcctctcagtgtctccagctggcgtccaggtcctcacactcagagcctggcagggcccggggcaccttgccaaccttcttcccacctcaaggtctctgtgtctgctgttccccgggcctagaatgggcttctttcttatttctgtcctattcggcagggaggtgacttccttgggaagccttctgggccacatccacacgtggctccgggtgtccctctcctggtccctgtgttctccttgctgaggactgtgcacaacgtcaaggagtgcttcatgatcccggttaccatccgccccggttaccatccaccccagttactatcagtcccggttaccatcagcctcagttaccatctgccctggttaccatccaccccagtcaccatccgccctggtcaccatcagccccggttactatcagatcccggttacatcagccccggttactgtcagccctggttaccatcagccccaaaacggaggctctgctgggcgtcctcctgtgttgggccagcccactccccagggcctcctgaatgaagggtccaccctgatcctcaccctgctccaagaggaaactgaggccatattcttcagccataggaaagaagggggaccctgcacaggccacaacctggatagatctcaacacaaagaccacggagcgtgcgatcccgttttcctgaaatgcccagaacaggcaaatccacagacagaaagcagatggggccgggcgcagtggctcacgcctataatcccagcactttgggaggctgaggtgggcggatcagctgaggtcagttcaagaccagcctggctaacatggcgaaaccctgtctctactaaaaatacaaaaattagccaggcagtggcgggtgcctgtaacccagctgctcgggaggctgaggcaggagaatcgcttgaagcccaggaggcagaggttgtagtgagccgagatcacaccactgcactccagcctgggtgactgagcaagactctgtctcaaaaaaaaaagagactgggcttggtggcacacgcctgtaatcccaggactttgggaggccgaggcgggcggatcatctgaggccaggggtttgagaccagcctggccaacatggtgaaaccccatatctactaaaaataccaaaaatcagccaggcacggtggcacgcacctgttgtcccagctacttgggaggctgaggcaggagaatcacttgaacctgggaggcggaggttgcagtgagcagagatagcaccactgccagtccagcctggacaataagagcaaaactccatctcaaaaaaaaaaaaaaaagagaaagaaagcagatgattggctgccaggggctgtggccgggaggaattcaggttgactgctggggggtgtagttttcagtttgggatggtgaaaatgctctgggacttggtggtggcggctgcagaacagcatgactatgaatgccactccactgcattttcaaatggctgaaagggtaagttttatgttaagtgcattttaccacaattaaaaaaaaaaaagaaaagaaagaaaagaagagaaagaaaaaaaggacaggctggtgaagccacctggccagcaattcttttgcaggggaggaaacctcgacccagagggcccgttaacctgccctaagtcctgcagccatacagggcacacctgacttccactcggtcagagcgtctacgctgtcagagcgtctacaccgcaggggccctgaatcagcacgtcttggcctacgtccctgggaggcttgtgcttttgggtctccgagtttgctgcacaagtgagggtttgggctgggcttttgtctgcagctctctccccgtctgtgtgtacaatttgtttgtacttaactcatttattcattaattcaccagggaaatgggagaccctggaggctcattggaggcaagacagaaggtgttctgggaagctgagggaggcagggcactcaacaagaagctgctattttcttttcttttttttttttttgagatggagtcttgctctgtcacccaggctggagtgtagtggcgcgatcttggctcactgcaagctctgcctcccaggttcaaggattctcctgcctcagtctcccaagtagctgggattacaggcttgtgccaccatgcctggctaatttttgtatttttagtagagatggggtttcaccatgttggccaggctggtcttgaactcctgacctcgtgatccacccgcctcagtctcccaaagtgctggtgattacaggtgtgagccaccgcacctggccttgagctgctattttcaaagctgggtagttaggacactgttgttccttgtctttctttctctctctcgtcctggcctcaagcaaccctcctgccttggcctccctgtactattttttctttttgagacagggtctcatagtgtcacccaggttggagtacagtggcgcaatcatagctcactgcatccttaacctcctgggctcaagtgatcatcccacctcagcctcccaagtagctagagctacaggtgtatgccaccacacctggctaatttttgtatttttatatttttagagacagggtcttcctatgttgcccaggctggtctcgaactcctgggttcaagcgaacctcccgcctcagccttgcaacatgctgggattacaagcgtgagccaccgcgcctggcctattattctttgaacataatccatctaccatagcaaatgttttctatgtgcaccatatctcaagtttaaaaacgaataaatggttaaaatggtcaattttatgttgtgcaaattttatctcattaaataaaattgaatggaaactccctctgaaacaaaaccacagtgaattaatcccataattacaactgtgataagtgggatttggagggagtcagatacagcttggcaggggctgcagtgttctcctagagaaactgacgacagaaaaatgatcttttcacaaaacacaaagctattactcccctgtctcaaactgtcccctgacccccgtggattctctctgtcctcaggactaagatgcaggcgcccctttcccccccgccccgcactgctctgaagaccctccagcctcagcccagccactccctcctctcaaacagcccttgcggtttcctccccatggagtgaccctctcacggccactcatgtgctaactcttcctcccctgtgcaggaggcgggacctggacacccgggccccaagggatggttctgagggaaccaggagctggagagctgacaggtgggtcacaagggccctggagtctctctgctgagggcagtgaggagccatggaggggcagatctgggggccagcatgtccaaaagcctaggacaggcatgtggagcacccaggaactcccctctggcctggtaggagtgtgggtcacaacaactcctagggacagccgagcagctgcatttctcaaaatgatggatacacaaaccctctgacctcaaaagctgctcctaagcatttatcctacagacattcatgtgaaacgacacaggattattcattacaggactcttccccagagcaaaggagcagaagttaagtatcaatgtccacaatgagggtactggttacgtaagtcatgccataactatactctgttattcctcgcagccagaaaaaattacgaggaagctctttaagtaacaatacgaaaacatgtttgagagaagtgaaaaagaagcagaacagtgtgtatggaatgctcctttttgtgccaaagaaaaaagggagaggaaaatgtgtctgtgttgcctatatctatatctgctatctctggcaaacaagcaagaaacgggagactcaggcgggtgaaccaggcaccggggaagtctgtaggagccttttcactgggtcctattctgtttcttctgaattctggacaatgtgcaacaagttgtctagtcaatactatatacaataaagggttggcataaagccaaaacccggcaaaactgatctatggcgtcagaagccaggacagtgactgcccttggaccacagtgatggaaacgacgacggcgggagatcctgggatgtggcgcatgtttgacttttttctttggatacttgtttacaccagggtgctccctttataaatatttatttaagctgtgtatttgcaaaccgttcgattttctgcgtttgtggtattattccagaaaaagtgttcaaaatgcaaaatacaaagatggcttcaggcccccgccgtgcggttgaactggaggcaaaaggccagagagcaggaggtcggcgctggggcccagtgggacaggggagagtcaggaaggggcagctgggacggtggggaaagtcggggagaaaggcccccagtttctggtcgagcgaggggcatgatctgaagattcataggggatcccggggaggggaactggtttttgggagatgaaaaattggggtgagggtgggtgtgtgagagagagagatgtgaaggggaggtctgggctggagagggttgggcgtgtcctgcggaacgaggagagattcagcctgggtggagggtacccaaggccaaagggggcgtggctggaggtgggcggcaacagggggcggggtagggccgttgatttccccacccggtctcggaaacccggccttggagcccggacttcctggctgtgtgaccttgggcaagtttctctttgtcttagcctcagttttctcgtcggagaaatggggattaaacctgcccaccccccagcgctgttacagaggcggcaggcgcgacccggggacgcttccaatctctggccagccaattctggcggggccaggtggagtcctccttctggtcctgtgaccttggcccgggacgcccaggcagagcctcagtttccccatctgctaggcggtaaggtcggtctccaaatagcgccagcagcgagagaggacttacccggaaggtgccgggttcgagcccggaacggcccctctgcaggtgaggcgggggcaccctcacctctcggctctcggacggccaccgctgaggcctcttgcgggcttcccagggctggttaccgtttcgttagggctggacacgtggcccaccccctgcaccgtccgttttccgcccacttgggcccagccgtccaatcgacactcatcatgctctgcctcgccgctctctccggccaatccgcatgtgccactgcctctgcccgcaatcggcgctcaccaactcaccccgccccctgcctctcaaccaatccgcatatgcagctgctttgctcccgccccagggggggcggtgccggcaaggctgtcagtctcaagaaaatgattagctcgcaaaggcgccgtgggggcggggcagcaggtcgttctgccaatggagagccgtagagggcgtgagtggcggccgacggggcggagtcgcgcggtggtctccgaaggctcagactctggctggagagagggcgtctcggccggccccattgcacagagcagaccgccgaggccgggagagagagagaggggtcttacctagagtagaggcatgtctgcggttcgaaacctggccctctctcaagaaacggaggcttacaaagatacccaagcactttccaggaaggggctggctgagggagcgatcaagtgaggaatttgacgcccccctgtcctttgcgctctgtgctgcctcagtttccccatctgtacagcacctgcctcctcgggtggtgtttagaataatttagactctgtgcttggaaatggaggttgagagaaagagagaatttcctatctgtcttggaataaatccaaactcctcccaattcatggtcggccttcctggtccgtgcagacctcgcctctcaccactccccctgctcactccgctccagccacaggggtctcctcttgctcttccctcaatgtcccaccgcagggcctttgcacgtgtgctgcctcagcctggaatcctaggactccccatggcccaaccttccaggctttcaaagcctttcctgaccacctggtgtcaggtagcccttccatcaggtcgctgtttttaatttttttgaaacatcaaaaaaaagaaaaaaattgctctatcacccaggctggagtaccatggtacgatcacagcttgctgcagcctcaacctcccgggctcaagcgatcctcccacctcagcctcctgagtagctgggaccacaggtatgcgccaccacacctgactaattttttaatttttttgtaaagatggaggtctcactctgttgcccaggctggttttgaactcctgggctcaagtgatccgcctgccttggcctcccagagtgctgcgattacaggtgtgagccgccgcacccggccttgtgttttattttcttttcagcactaactccaatctgaattggaaatgaatcttgctttttgaaaaatgcatggatatactcttttattgtctgttccccgccaaaacacacacatgcacacagaacagggagctccctgaggcaggggtcccgtctgcctcgttcacagctgaatcctcaagtcctagacctgggcctggcccatagtaggcgctcgatacatctttgggaataaatgacaggagagcagacattaggcagaggtgagcctgggtgagagtgaggggtggatgcccagatggggctaggcagaaggaagggggaaggcaggaaagcaagaagaggtggaggtggggcccctgggcccaggaggagacccctgaggcagtggtctgaagtgggggtctgggttggtttattttcccaggggctgccaggaagggagtggacaggttgggggctcctggagagggctgtagagccgtcgtggaggggcctctggcttgtcctgggttctgggctgggttgtgattggcctcatggggagctggtcccccaaccctcggggatcccctgagaatcccaggcacgaggcacctcccagcagtccacccaaccccagtcgggagccacgagatcagcctcttcccccagggcatgctggggaaggggcagggggccgcagaaatgtgggacctgcctcaggtccagctggcccaggtcgcgatgggacagacccggcgctggcaggggagcatcagaaccagaggaggggtcccatggcattgaggcacactctggggtgagcgcaatgttgtcaaagaggtcgagggtagaggtgtccagggcagcgagactcaggctggcgctggcatggggagcctcagtgggggccacagcacaggccactcccaggaagggggatggaggcggtgggggtggcttttggagcgagggtctctggggaggtgcctcctgggacaggatggagagggccaggcgctgggtggcagcctcaatcttggtgaactgcctgtaaagacagatgtgagcaggctggtctctaacgcctgaactcaagcgatcctcctgcctcggcctttcaaggtgctgggattgcaggcttgagccaccacccccggccagcatatttgcaagggtcacctatgtggtcgcatcacaccgtgctagttatttattttggtgattcctgaccgtccgccacccccatgaaaacacaacctccacgacagcaaggaactttatctgctttgctaactggcctggcacacagtaggcactcaataaatgcacgttgactgttgctggcatccagccctgggggctgctcctctctgtctgtacctggtctcccccagccaagggtgctggttgctccttcccctcttccccgtcccgtgcccaccttccccaccagccccctcacctgcagatctggttgtgcagaaaccttctgtggttgggccgcctcttggggggccgggtgcgccggggctgcagggcccgcagcatgtgggcggccgccccgctcacaaaggcacacagctcccgggggccgggctcggagaccccagggccttcggggaccccggggtgcatggccagggtggtctggagtaactccccacaatattgctgaccaaagcaccccccaaatctgtgagcagggaggggcaggggactctggaggcccaggcaccccgggctggggaggaggcagggctgggaattgggccaaggcctccccactgtgccctaaccctgtccccacctcccaggagcccgacctgaagtctgagggagcggcaggtgggggctaatataggaaggcagggaacagggaggggagggggctttctggggccctctaagtgcccaattagcgcatagttggacctgggatatggacctggcgtgcgtcggcggggggcagagaatggtgcctggagatggccaattaagggaacaaaggcctcgttcgggaggcgaggccgccagtaagtcaaatgcagcgattgagcgtggaggacccttaattggagccgtggggagggggctgggagggaggggagctgggctgcatctgcccacccaccctcagacacacctgtgcctccctccctctgctcagcccagcaccttaggaggggaaaccgaggctcccaaaggggctggtgcgggccgaggtctccagccagcaggaggggttggctcctggagggtcacccccgaaatcctggggctcatagaatcctgagcagcagagtgagggaggagagggggaagggtgtggcaggacgggaggggacgggagaacagggcgcagtctcccccagggtgttttattgaggcactgggacccctggtgtctgtgggaggcagaggttgggccgggtccccttgtttctggaagggtgttggccggagcggggaccctgggtctcaggttgggtaggggagcaccgggtgtgacagcctcagtctctgcttggacccccaccctcgggggtctgctctgggaagccaggatgtttcccgaaattgatgtaacaaatgaccacggctcagtacctagaaccgcacgcgctgattctcctgcctgaagcagggatttaaacctgacatcatgagtttgcttcccaggcccgctcactggccagcagcactatgggcaaggtcagcagttgaggtcctaccaggcctagggtgggggccagcaggcaggtgggggcatattgggagctggggctgagtgcagccagtgatgttgccagaggtccagtttcctgtcagcaggacatggtgagaccagctgcagtaggacagacagacacccagtgccctcaccagccatggcacgtacacgttgactgctacccctgccatgctcaacactaccactgtgctgaaccactgcacaggtggggctgctgggcctggtgtggctggtgtctgtgttggggacaccattggcctcccatgtttctctcgggtgtctccaagggtctccagcctcctagacagcctcttgtactctgccccttggtccctctgcctgccagctgtctgtgactcacactagccccattgctatctctccatctcgcccacccttgctcgttcctcttctgctcctcctggctttctgtccatccctgggttatccacaattctctcaactatcatctatctatcacctgcctatctatggatctatcatctatgtatgtgtgtatgtatgtatatatctatttttagagacagagtctggctctgccacccaggatgcactgcagtggtgtgatcctggctcactgcagccttgacctcttgggctcaaggggtctttccacctcagcctcctgagaagctaggattacaggcacctgccaccatgcttggctaatttttttcttttgtagagatggggtctcactatgttgcccaggctggtctcaaacttctgggttcaagtgattctcctgccttgacctcccaaagtgctgcggtcacaggcgagagccaccgtgcccagcctctctcctctgtattgtctctctgacttcatctctcccatttgtgttccggttcctctccctgtctctgtctctttcactgtctctggagtttctctcagtgtttatgttttagactctgaatgctcttcactgcctgtctctcagcttttctgtttctgtctctctgtcttccccagggcatggtgtgtgtgtgtgtgtgtgtgtgtgtttgtgcacgtgtgtgattgttactggatggtactgtgcagttccagtctcctggtgtccaaaacaaagaattggatgagacgcgcacagacagcaaaggaaaggagcaaacgtttatgaagcacagtattccactctcagaggggagagcggactgagctctccgagatgagatcagccccagtttgttacatttcatggccttttttttttaaaggactctttttaaattttttttttattttttatttttgagatggagtcttgctctgtcgcccaggctggagtgcagtggtgcgatctcagctcactgcaacctccgcctcccgggttcaagtgattctcctgcttctacctctagagtagctgggatcacaggcgtgtaccaccatgcccggcgaacttttgtgtgtttttagtagaggtggggtttcaccatgttggccaggctggtctcgaactcctgacctcaaatgatccgcccgcctcggcctcccaaagtgccgggattacaggcgtgagccaccgcgcccggccgtacatttcatggccttttatatgtttttcatcacttccttaacctcactttatctcttgtaagttagttgctcatccttgcctaatctttctttatctcttttgaccaaattgctcatctttagctttatttttcgtggccaaactgctactgcaagtccttctggcttattttccttatcctgcatgttccaactcactgcttcctcccttatttcgcatgtcctgcttctgccatttgacacgttttgcttctgcttaagctaacctatgtccaacggtccccttcgccccccgaatttctctgctattctcctgcctcaagatgtccgtgagtctggttcacgcctgtggtattgggggtggcctgaaggtgaaggtttcctgtcctgttctgctccaggtctcaggtacagagggaagggtccagggtcccttggcaagaggccgaagggagaagacccctgggtctctggaggatgggaagggaaggattggctctgagggccgggaaggggcccgccgccacgtggctggggtatgacctttgctaccttgatacacactttatcgtgtgtattcacatctggtagctcttatttcaaaatttgcattccacagtccaggggccaagagcaacatccgccggccagctctgtcccactcaggccggccagcaatgcacagggcggccgcctgcaggctgcggcctcgggactgtccaccagggggcgcccacccggccggtgctgggcggcccggctcaaggggtgcggcccgagaacttggggccctctcctgtctcctgtcattgagaacaatcaaccacagcagggagctggcttcatggggtctttgttgaggacctgcacttccaggtgctggaaggtcttccccagcctcctctcccctatcccagcccttgaaattctgtgtgtgttgggggtggatttagtcattcaacaaacatttattgagcaccttgctttactgagcagtggaggaggtgaagtcagagaagccgagggggcgcggggagcagacctgccgggctttgtgagccaggcaagggttgggctatgagggtaagcatgatggagaaccatagagggtttggggcagggtctaacccaaccttctttgcaggccttgctacagctggaatgtggagaccccaccctccaatccccctacaatctggatgggggtgtcagggccaggccaggaagccagggacaacccagggtgtgtccttccctgtccccacctgctcatctgctatctgctccctctcatcca[144 bp omitted]gcctcccaagtagctgggactacaggtgcccgccaccacgcccggctaattttttgtatttttagtagagatggggtttcaccgtgttagccaggatggtctcaatctcctgacctcttgatccacccgcctcggcctctcaatgtgctgggattacaggtatgagccactgcatgcctagtctttttttttttttttttgagacagaatctctctctgtcacccaggctggagtgcagtggtgcaatcctggctcactgcaacttctgcctcctgggttcaagagagtctcctgcctcagcctcccaagtagctggaattacgggcgtgcaccaccacgcccagctaacttttgaatttttagtagagacagggtttcaccatgttggccaggctggtctcgaactcctgacctcaggtgatccgcctgccttggcctcccaaagtgctgggattataggcgtgagccgccgcccctggaccccttaaaatttattataaaaatgtacagatggcagagtcacaatgcatcaccctggtgttcccaacccagacgcagaggggccaaccctgtcgtatttggttcacaactcttcttctgagagaaggcaggccttggctgcctgtgtccccccagattcagatgttgaagttgtaacccccatgctccagagtgagacagtat[132 bp omitted]gaaaccccgtctctactaaaaatacaaaattagccggatgtggtggttcatgcctgtaatcccagcttctccggaagctgaggcaggagaatcacttgaacctgggagatggaggtttcagtgagccgagagcacaccattgcactccagcctgagcaacaaaagtgaaactccgtctcgatgaaagaaaagaaaaggggccggacgcggtggctcagcctgtaatcccagcactttgggaggctgaggcgggcggatcacaaggtcaggagatcgagaccatcctggctaacacagtgaaaccccatctctactaaaaatacaaaaaattagccgggcttggtggcgggcgcctgtagtcccagctacttgggaggctgaggca[137 bp omitted]ggagaagggaggggaggggaggcaattaagttaaacaaggccattagggtgggccctaatgcaatctgactggtgtccttacagaagagattaggacacagacacacacagaggggccaccatggaggctccacaaggaagacaagcgtctgcaagccaaggggagaggcctcgggggaaagcaaccctcccgacaccttgaccgcggacttctgtatccagaaccgggagaaaataagtttctgttgttggggccactcagtgtgggactttgctatgggggtcccagcagactcatatatataatgagtgtattcgctctctacgctgtgtaagaaatagccactgatgcaatggctttaaacaacgtacattcattatctcacagttccgtggccaggagtccagcaccgtggtttatcttggtcctctggtcaggatcgctgcaatcctcgagtgacccagggctgtggtctcatctgaggttggggtccgctcccaggtttacat[136 bp omitted]gacccccgagtagctgggactacaggcgcccgccac[138 bp omitted]cccggcctcatttccgtgcttctgaggaaggcatggagccctgggttcacggccagcaggagaacctcagtgcttcccatctttgatctctaggtccagctttaaagagctccactgactaggtcagatccacccagggtaatcttcctgtattagtcagggttctccagagaaacagaatcaataggctatgtctgtctatccacccatcaatcaacctatacatccatctatttatccatagattgatctatgaggatagcgatagatatgaatagctacaacaatatagatacatctctccagaaagagagtgattagaaggtattggttcatgtgattatggaggccaagaagccccatgtttgctgtctgcaaactggagaaccagaaaagccagtggtgtagttggagggcctgagaaccaggagctgatggagtagattccagtgtgagtctgaaggctggaggaccaggaggcccgagggcaggagaagattgatgctacagctcaagcctgagggcagggatggagttccaccttcccctgaggctgaggcccacccaccctgcgggaggctgcctgcttggctcacgctaccaattaatctcttccggaaacactgtcacggacacacccagaatcacgtttaaccaggtacccgcgcatcccgcggcccagttcagtacatgcataaaatttaaccgtcacttttccccttgatgaactcaaagtccactaatcaggatcctattttttttttttttaatgagacagagtttcgctcttgttgcccagcctggagtgcagtggtgcgatctcagctcattgcaacctccgcctcccgggttcaagcgattctcttgcctcagcctcccaagtagctgggattacaggtgccctgccaccatgccctgctgattttttgtatttttagtagaaatggggtttcaccatgttggccaggctggtctcaaactcctgacctcaggtcatccacccgccttggcctcccaaagtgctgggattacagatgtaagccaccgcgcctggcctcaggatccttgattgcatctgccaagaccccccttgccttcaccatatcacataaccatcacatccacatgatgcaaaggcactcacacaagggcacgggtccctgggggtcatcgtagaaggtagcagccactcttagggaggaaatttagcatgcatctgtccctgtccgtttttgcacttaaaatggaggaaggttttacctgtacagatggaaccctgtatattgttgcttcctccagggagtctgccctggtttcccccaggctgcgtgaggaaggttttacctgtacagatggaaccctgtatattgttgcttcctccagggagtctgccctggtttcccccaggctgcgtcaggaaggttttacctgtacagatggaaccctgtatattgttgcttcctccagggagtctgccctggtttcccccaggctgcgtcaggaaggttttacctgtacagatggaaccctgtatattgttgcttcctccagggagtctgccctggtttcccccaggctgcgtgaggaaggttttacctgtacagatggaaccctgtatattgttgcttcctccagggagtctgccctggtttcccccaggctgcacgaggagtctcccctggctcccatgtcctgggcagcctccatgagtgcctgaccgtgcatgtgagacctgctcgataggccttggaagtgggtggactctggggttgggcacattcctggtccaaccacttctgggctgtaggaattccttcctggttacaggacactacatcacttcctggttctgtggcttggccatgagacttcagagggccttgccttaccccactgtgaaatggggatcacaccccttctgagtggagaggcccgttagcttggggccggctggggctgccacgggggccttaagagatgtcagaagggagcatcctggccaggtgcggtggatcccgcctgtaatctgaacactttgggagaccgaggcgggtggatcatctgaggtcaggagttcaagaccagccaaattagctgggcatagtggcaaatgcctgtaatctcagctactcaggaggctgaggcaggagaatcatttgaacccgggaggccgaggttgcagtgagccaagattgtgccattgtactccagcctgggcaatagaatgggactctgtttccaaaaaaaagaaggaagcatcctgagtctgtgggaggcaagggcctgccccctgggtcccctgttccgggggatggccggcaaccggtgactccctttgcccgtcccctccgccttcaacctaaaatgcatctctggttccttacccgacttgtttggaaaaggacgttttatttttcatcgctggccctgggaatccagtcattactccagatccctccttcactccctgaccccactttctggagagggagggaaagggagtggcaggtcccttctaaagccttcggctgatcctcctgggatgggggtggatggagaagaatctcccaagtgcgtgcagggcctctgggcggaagtgacagcacagtccccaggaaagggtgggtacctagaggggctgaatggtttacctggctggcagggggcagggctcagagtctgaggctgggcaaggaggctgatctagttggggtggggggaaccgtgcccccaaaacacctggtgcggggtgttgttggccagaaacagaaacgtctggggcctgcaggggtgcaggggtgtgcatccgcgcgtctgcttggtcctgcgtttgaggctctggaggtccccttgctgccctggagctttatcccccgctgggcttttccctgcagcactgagcagcgggtagtctgtcttctttgttaccactgcatgccctgggaggttttgtgagctcactgggatggtgagttttttattggttttccccctccacattgctatgacccagctcccagggcaggacctggggtggagccctggtctggactgtgggtgggagcgctgctgggcctggaacagctgcagctgaggattctgtgtgatcttatccatgtttttggctatttgattctgtttttgtctgtttgtttgtttgagatggagtcttgctctgtcgcccaggctggagtgctgtggcacgatctcggctcactgcaaacctctgcctcctgggttcaagcaattctcctgcctcagcctcctgagtagctgggactacaggcacgcgccaccatgcctggctgatttttgtatttttagtagagttgggggggggtttcaccacgctggccaagctggtctcgaactcctgaccttgtgatccgcctgcttcagcctcccaaaggcctgggattacaggcatgagccactgcacccagctgattctgtttacttgtcagcatgagggacctgacaacatcccttgaagggctacacagatgttccggggggttaggagacaaccccacctccccatctgggtccctgagactcctccttggcctggaaagtgctggacacaaggctggcctgagtttcctccggtcactgtctccaaggggctgcgaggctgttctgaaaacaaacctgttgaatccacaccaccttttcagagacagcaggttgcccaaggccattgacttcaaaacctttgttcaccttctggctgcaaagtggggaatgttaaggagagtaagagccagtcttagccatgccaatctctctttctttttttttgagagggtctcgctctcttgtccaggctggagtgcagtggtacaatctcggttcactgcagacttaacctcccaggctcaagcgatcccctcacctcagcttcctgagtagctgggactacaggtatgtacaccacaggaagcttattttttgtagaaatgaggtcttgctgtactgcccaggctgggtgtcccatcccttttgtaatgcctctgcgtgggcaggtaaatgaggggggctgagctgagggcccctttcactactgcagagaccaaaatggcccgaggcaagggggacggaagtgggatccgcacctctgggctttcctagcctggcagccagctgggcagtgcattcccatccacgtctccaccctgcatggcagccgctttgtgtggttaatgctgacgtgaaaggaatgttgggctgagctggatgccaagggtttttacacgcacgaatgcacggagacatcagcaccaagaccctgtaaggtaggggtgggtccacaccaccgcagatcagccctgagttccagcctgcttgtggacttgggaaacggtgtgggaggctggaaaaatccactcattcaacaaacaagtaccgtctgcttctccatcagggcccatgctggttgtttggaatacctgggcagcaaagacacgaaaggtcctcgctgtcatgggacatagataaatgtcgctgagcatgtaagagggacaccacctagcacaggaggctttccagtgggatcttgctgggcagggatgggttaagggtagaagggccttctggcctgagaaacagcatgcagaatggtcttcaagctgagggtactgcctttgagcagtggctctcaactagtgaacatgtggcaatgtctggagatattctttttgttgttgttgttttttttttttaacacagagtctcactctgtcaccctggctggagtgcagtggcacgatcttggctcactgcaacctccgactcctgggctcaagcgatcctcttgcctc[134 bp omitted]cagcctcccaaagtgctgggattacaggtgtgagccaccgcgaaaatctctatctggagatattctgagctctcctacggggtgtgtggagcggggctggggatgctacctgcatctagtgagtgggggccctagagtgtgtaggacagtccccgctgcaatgaatccatcccaaatggcactagtgctctggttgagaaactgcgtttaatgaccctcagaaaagccagtgtggctggaacgctgggttgggcgggggttgagcgtggagaggggctttggagcagctcggtctcccactaaaaccctaggccccacaaggagtctgtggattccagcctcccagaacagacctttgcccagcaggaaccaggtttctgcagcgtctggatgagcgtgcacgaagcacacgcccgaaaatcctgagcacgtggctctaccgagggactggaagcgctccaggcctcgttttcccgctggagcgattacaccctgggggcggggcccgcttcacgggagggatttttgtacaaccgtggtgcatggaaggatttttttgcagatgagagggaatcgggattaataaggggaacttgcgaccccgcgtctcgagctggccgtccctggccttgggctcaccggggcctcggcccccaagacctgacaactggagtccgcgaccacaactgggagaactacaactcccaggatgccgcgcaccgcctgcgcccgagctcgacgaggcctcgcacagccaatgggagggtccgggggcgggaactcggagtacgtgcgttgtgacgcaccgacggcgacgtcggggtttgtgtgcgcgagaggccgccgataaaggttgggtgcctcgcgccgggggccgttgggagggagtgcgcccctgccccccctccccggtccccacagctgcaccgccgctgccggggccccaccttcccgtcgacccccgcgggaaggtcctggggctgccaccctcgttcccccgattggggccgcaggtgagagaccggagggggtgggggtggggggagggaccggagggcggagaagttgcagggggtggggcgggggggggggcgtgaaaccggaaggggtaccttaaaggggagtcactatttcacctccgacatttgccagctaggccgggtccgccctcttaaagggcaaggggccacattgagagggcgggtcaggctttgcatttttacagaagctttctgacttaaaacaatgtttttcccctaaaaggcggttatctcattaaaggccagtgaccgtttcccagacattgaagcaaaaactcctgagtcctggttgcttcaaagcgatccctggtttagctcaacaaaagtggagatggggctccagtggcagcatccccttaaaggggaggtccagcctgctgaacgggtgtggcgcggccttttaaaggggatgtcttcttgttaaatgggaccccgctctttcagggcacggatatctcttttaaggagatgctggggcttctcaaaggcacgtgcagcttcttagcatcagtaggtttgttttttttttttttttttttttctggagacggagtcttgctccgttgcccaggctggagtgcagtggcgcgatctaacctgctt[225 bp omitted]gaggcaggagaatcgcttgaagccgggaggcgaaggttgcagtgagccgagatcgcgccactgcactccagcctcggtgacagagtgagaccctgtctccaaaaaaaaacaaaaaaaacacacaagttcttgtagcttgtccgacggggatgcctagccttcattcatttaaaatttgtttactgcgcacacactctgccagacattattgtaggcactgggatggcatacaacagtgaaccagacagaagcccctattttcccggcgttgacattctagcatggggaggcagaataaaacagaaagcacactggttatatagtagcggttctcatctgggggcaacggtgctccccaggggcgacactgcggctaagactcggaggtgcaggagtgagctttgtggacagcgtagaggagggcttcataggccaatgtcaggcgtccagtgggtcgaggccgggggccagggctgctgctcgacaccctgcagtgcacaggacagccctcaacagagaatggtctggccccacatctcagcactgctgaggctgagaatcctggtacattagaaggtgataattgctgcgggggaaaaataaggcaggaaaagggaatggggagttggaagggattgtagatttaaatagggctgtcagggaagctcttgcagaggggatttcagcgaagactcggaggtgaaagagcgagtggcgggcacaggtggaaaggaagggggtggttctaggcaggtgccctgaggtgggagcaggcgtgcctggccatcctgggtgaccagagtgaccaggggcaggtggccagtgaggatagcagtaggacaagtcagggaggggacaggctgcaggaagtcggcaggctcgaagaccagaactgtggcagatttctgagtacaggaatgcaatgcccagccctccctgttgacgggttcgcttcagttgctgtattgggaacagacgggtgggcagggcacgggtggaaacacggcgatccgtggggaggctgttgcagctgcctgggagagagacagtggtgcctcagatcaaggtggaggcctgtgagaagtggccagatcttggatatgttccgcctggaaggggaatctgcggacaggggcaatcgagagagaggaggcgaggagcctttggcctgaggaagaagacggctgccattttcagagatggagaagctatgggtggagtagaagttgggggcgaggagcagaagaccatagttagattttgggcatgttaagttggaggtgtctaatgaggcatccaggtggaacagtctagcaggtggtgtggcattcagagggtaggtcttatagagctggaggcctggagtcattgttcatagacagtggagtcctgagagtgggtgggggctcccagggagagaggacagacagaggacaaagtggtgccggagccccgggcgctcccacatctagaggtcagggaggtgagaaggaaccaagctggggactgagatggggtgacaggtgacggagggcagtgagggagcgaggtatcccggaggccagggggaggcgggccacggacccagtgacaagtgggccattgcgggccacgcgccgcccaggccatggagtgggggcacccgcgtgggactgaaggggtttgcgctgggaaagagcgggctgacacttgagctgctctgctgtgaaggaatggagaaacgagtctgcagctggacagggaagtggagtgaagagctttttggtttttaaagatgggagacatagattgttggttctgcagatgggaacgtccaggagaggaggaaaagtggaggatgtgggtgggaaggcacagtccacgggcactgggtcaggcctgtggggaaggattgcgcagggtttctggacctcgcactgctgacattgtggatgggattgttctccgctgtggggccgtcctgtgaattgtaggatgttgggcagcatccctggcctccacccactagatgccaggagcacttgcctctctagttaacagataaccccaaatgcctccaggcattgcgggatgtcccctgggttgaaggcacagtttgtcccagttgagaaccactagtatcgtggtcagaatgtgagaaacttcgcgtctgattgcttttattttcacagaggcatgatcaaggacagggttgcctgccaagaacaggaggggagaggaggggctggaggtttcaggagaaagaagcatgtcaggtagtcacctggggagtgcatgggccagagacatgtagtgtgagccagggagggtgatggtgagggggccgcagattttgtgggcttgaagggaaagtgagactgaggccaggcaagggggtgcctgtcatggccacctgcagcgtttgtgcagggtcgggcaggagtgaggatgtgggttggctggaggtgaaagggcgcgctggatggtagatgggctggagtctaaggatttggggagttggagcaccaagctagagtgacctagaaggctttgtggtgttgggaagtaggttgttccaggctcaaccatgaggacactttttttttccttttttttttttttgagatggagtctctctctatggcccaggctggagtacagtggtgtgatctcggcttactgcaacctccacctcccaggctcaagtgattctcctgcctcagcctcccaagtagctgggattacaggtgcctgccaccacgtccagctaattatttatttatttaattattttttgagatggagtttcactcttgtcacccaggctggagtgcagtggcacgatcttggctcactgaaacctccacctcctgtgttcaagcaattctcccgcctcagcctcctgagtagctgggattacaggcgcccaccaccatgccgggctaatttttgtatttttaatagagacagggtttgaccatgttggccaggctggtttcaaattcctgatcgcaggtgatctgcctgcctcagcctctcaaagtgctgggattacaggcgtgagccacagtgcctggccccatgaggaggctttagttaaaatgaaaaggcttagggtatggcagtgggaggagtgttgaggccgagatggaggataaggtcttagagggagagcagcaaggaggagccaggagagcctctctgcgtgtggtcttcagggaccctgcctgtctggagagggagggagcagactcctacaggcagtgcttgctctcttgaaggcgggccccagccttctcagacctggctagcctcctaaggagggtggccacagtttgctggggagtttccatttcagcactgaaagtgcagcatcgctggcacctgctcaagtcccaagcaaactgggaccattggagaccctcatcctaaggaaggtcccctgcaaagtgggtgacctggggaggtagtccctgtcccttaaagagcccgtgtgtgggtttggggttgagatgatccagtgcgggggtgagccgctgacccagaatccctcccccaggtgtgatggtcggctcccacgcggacatggcgccggcctctactgcggagggggccggggagaagccaggccctgcggcccctgccccggcggcccagtacgaatgtggggagtgtggcaagtcattccggtggtcgtcccggctcctgcaccaccagcgcacgcacacaggcgagcggccctacaagtgcccagactgccccaaggctttcaaaggctcctcggccctgctctaccaccagcgaggccacacgggcgagcggccctaccagtgccccgactgtcccaaggccttcaagcgctcctctctgctgcagatccaccgtagcgtgcacaccggcctgcgggccttcatctgcggccagtgcggcctggccttcaagtggtcgtcccactaccagtaccacttaaggcagcacacaggcgagcgcccctacccgtgcccggactgccccaaggccttcaagaactcgtccagcctgcggcgccaccgccacgtgcacaccggcgagcggccctacacctgtggagtctgcgggaagagcttcacgcagagcaccaacctgcggcagcaccagcgcgtgcacacgggcgagcggcccttccgctgcccgctctgccccaagaccttcacccactcctccaacctgctgctgcaccagcgcacgcacggcgccgcccccgccccgggtaccgcctccgcggccccgcccccccagtcccgggagcccggcaaggtcttcgtgtgcgacgcctacctgcagcggcacctccagccccacagcccgcccgcgcctcccgccccgccgcccccgcccccgcccgtggtgcctgagctctttttggcggcggcggagaccacggtggagctggtgtaccgctgcgatggctgcgagcagggattcagcagcgaggagctgctcctggagcaccagccgtgccccgggcccgatgcggcgccccagccccaggaggcacccgccgaggcgcccaaggccgaccagccaccgtcccctctgccgcagccccctcctcccgccgccgcccccgcgcctggctttgcctgtctgccctgcggcaagtccttccggacggtggctgggctctcccgccaccagcacagccacggggctgccggcgggcaagcgttccgctgcggcagctgcgacggctccttcccgcagctggccagcctcctggcgcatcagcagtgccacgtggaagaggccgcggccgggcgcccgcccccgcaggctgaggctgcggaggtgacctgcccccaggaaccgctggcgcctgccgcccccgtcccgccgccacccccgtccgcccccgcttctgcggagcggccctacaaatgtgccgagtgcggcaagtccttcaagggctcctccgggctgcgctaccacctgcgggaccacacgggcgagcggccctaccagtgtggcgagtgcggcaaggccttcaagcgctcctccctgctggccatccaccagcgggtgcacacgggcctgcgggccttcacctgtggccagtgcggcctcaccttcaagtggtcgtcccactaccagtaccacctgcggctgcactctggcgagcggccctacgcctgcggggagtgtggcaaggccttccgcaacacgtcgtgcctgcgtcgccaccgccacgtgcacactggcgagaggccccacgcctgcggtgtctgcggcaagagcttcgcgcagacctccaacctgcggcagcaccagcgcgtgcacacgggcgagcggcccttccgctgcccgctctgccccaagaccttcacccactcctccaacctgctgctgcaccagcgcacgcactcggcggagcgccccttcacctgccccatctgcggtcgcggcttcgttatggccgcctatctgcagcggcacctgaggacgcacgccccggccaacacgcctcccagcaccacagcccctgccgccggcccccagccccctgctccactggctgctgcgcgggccccgccagccacccaagatgtccacgtcctgccccacctccaggccacgctctccctcgaggtggcggggggcacggcccaggccccgagcttggggccagcagcgcccaactctcagacgttcctcctggtgcaaactgcccagggcctccagctgatccccagcagcgtgcagccccctacacctccgccccctcccgcacctcccaagctcatcctgctgccctcctccagtgctggggctgggggcggccgtgcaaggcagggcccgcgggcagtggggaaagcgggccagggggcgggagtggtctggctgccaggccctgggggtctaggggtgcagggagcggccagcgctggggccagcgggacagggcagagcctcatcgttctgcagaatgtggggggtggggaggcagggccacaggaaatgagtggggtgcagctccagcccctccgaccagccccagaagtaaccacggtccagctccagccagcgcaggaggtgaccacagtccagctccagccagcacaggaagtaaccacggtccagctccagccagcacaggaggtgaccacggtccagctccagcccgtggccggccagctctccaattccagtgggggagctgtggctactgaggcacccaacctgctggttgttcagagcggggcagctgaggagttgctcactggcccgggccccggggaggcgggggatggcgaggccagcactggtgtggtccaggatgtcctctttgagacactccagacggacgagggcttgcagagcgtgctggtgctgagcggggccgatggcgaacagactcgactctgcgtacaggaggtagaaacacttcctcctgggctgacggagccgcctgccaccggcccacccggacagaaactcctcatcatccgcagcgccccagccactgagctgctggacagcagcaacactggaggaggcaccgccacgctgcagctcctggccccaccgccgtcaggcccagcctcgggccccgcggggctccccggggctccagcctcccagatggtgcaagtggtccccgcaggagctgggcctggtgttatgacccctcagggcctgccctccatccagattgtccagactctacccgcagtccagctggtgcacacgttttgaggagaggcagtgattcccctcccgccccgcacagagaccccgactcactgccagccggggcggggcagggtgccgcaggctgggcttgctaataaagacccgagtctccccgcctgtgttttgttttcctggggggagggaagggggcaaagtcatggtcctagcccccgcctgggagcgtggagtcttaagtcttgcgtcctgggtcgcagatggcttgttctgcatcctggggccagccactacgtagggctcagttcccctgtcctgaaaccaaaaaaggccgcaggggtcattatagtggggaggtggtgacatcagactccagggagtgctacttgttcactgtaggtcgccccgctgcccccctcgtgtgagaagtagggggatccttatgcggaagggttctgcgaccccgggcgccccgtgggtggagtggggtccctggggatgggggagtcgggcgccaggatgctgagcgtggccggctcctcccgcgaaggccccggcacggatgagaatccacgcgctggcgtcgccgcccggcgctcaggttgctcagcaacgagggaacgtggggcgggagctcgcgctggtccccagcccgccgcccgtctcctgccggcttccgctcccgttcttccccaggtcccctttccccgttgctccttctctagggataggagaggtcgcttcccggccctccgcagggtcacagctcggttcctcccagcccgccctccggggagcttagcaacggttgctacggcccggagcgggcgccgccccgccccaccgcgcgcggtctgacgtcacttccgcccgcgacccccttccagacccgctcccgaaaccttgtcgaaggaccaaaggcgaccggtgcaggtgcttgctggtccttgttcttgtggcgcgggacggggacgactgtgggggagggggcgctggggaccggggtggagcgagcgtggtccgttctctggcatgtggggagggtgttcgtggaccccagtgcctgggagggagccccgtgctgcagtgttggcgtccgcagcgcgtttgggagtgtagatcgctgaataatacgggggaggggggatcccgggagactttagcaaggtcgctgagtattgtggggggcgcctgtcctgccgagatcctcgcttgggggccccgagggttctcagtgtcctgatctgggaagtgccgttgctgctccctacccctcgggggagctttggggacagaggtgcccccctgacgctgacctacttatgttctcaccaggtgcacgacgccagctcccttctggggggccggggcctgggggttgccatggcccccagccacctgtcagtgcgggagatgagggaagatgagaagcccctggtgctggagatgctgaaggtgagaggcaggggccccagggggcctgggagtggctgcagtgggggaattgcaagtggattcagccaccccctcccacccacctgagccagcctggacccctggagcgggatcttttcctcctgagcctcagccgccctgctgctgaaaaccacagcaggtgtggcaggtgggggctcacccccccagccctactgggaccccagcaccaacgccctccctggtctcccatctccagtcggctgtgcacgccagcacaacagccagctctgtgcctcggaccccaactcttcaaagcacagcccagcaccccaacctagcccagcagcctccctccagcctccactccagcctgaggcaacctccctgtccttacttccctggggcctcactgcggcattgctactgaattgagtgcccccacagctcctaattcactcatccatccatcattcgctctcgttcattcattcactccatacccagtgtgccacactgaacatcggactgtgctgccttcccttcccatttgggagctctcaccccgccccgggcagggtctacctcctctctttgtccaggaggccctagcgtttcggatggctgagccacccctcctgcccacaggccggcgtgaaggacacggaaaaccgcgtggccctccatgccttgacacggccgccggccctgctcctcctggcggcggccagcagcggcctgcgctttgtcctggcttccttcgccctggccctcctcctgccggtgttcctggctgtggccgccgtgaagctgggcctgcgggcccgatggggctcgctgcctccgccgggtggcctggggggcccctgggtggccgtgcggggctccggtgacgtgtgtggggtcctggctctggcccctggcacaaatgcaggggacggggcccgggtcacccgcctgtctgtctctcgctggcaccgccgccggggcgtgggcaggaggctgctggccttcgcggaggcccgggctcgggcctgggctgggggcatgggggagccccgggcccggctcgtggtccccgtggctgtggccgcctggggggtgggagggatgctggagggctgtggctaccaggccgaggggggctggggctgcctgggctacacgctggtgagggaattcagcaaagacctgtgaagctacagactgacagccagggcaggggaggagggaggggcgccagcacctgatgatcgcctactgtctgcgggttcttttacctgctctccctcagtgagtcctcaaccaccctgggcccagaaacagaggcctgccgaggggaggagcctggcctctgtccacccgtcagcagtgtgaagtctgttgtgtttgagcttctcagagtggaatgactccttttccttcctggccctcgggggcctctcgaggtcagcctctccaacccctacctcagctcctgtctgcactgagaaacctccccgggtgatgtctgcaaagtctgtgctgtccgtgccccaggctgggagagctatctggggagggggagaggaggccgagcagaatacaccccagagttagggtttgcgactccgcctccctgggacctggattgggtcagatgcctgtccttggaggggacaaggttgactgcttaggaggcgcgacgcacagggctgccaggcctggcccctctctgggaaggttgagagctgagacgggcagccctgtcccttcctccagatccgtctggttttttacaccgtttgttaataaagcctgaaaccgctgtgtgcctgtctcttctctgatggctttcccagtctgtctccggacacccccgcccatttctgtctggcttctcctttccccagttaacattaattgttgggggacggtgctggactgggagaaggggaggctgtgagctcaggggcagcccgaggccctgccagcccttctgagtcacgctccccattaccgaattttttccgcctcacagctgcctggtgtgcaggcagtggggtgtgtgtgtgtgtgtgtgagtgtgtggaagagtgtgtggagcccctccccttcccaagccttgacccttgtgctgcttatcccccgaccccagctccctctgggacagtgaagttcaacctctcctctctcagctggggactgggggcttcacactcagatccaccagtgagtgggaggactggagggccgggtctttcagtctcttttcctaacccaggaagtccctcctggtgtctggctgcaaatcttcttgctgctgcaccaagaaccccaggtctgcccagcccccaaccctagcagtggtctcactggatttccctgaccagacaagaggggagacagcaggtgggcgcccctcccgctcatgctgcgccccccccgcacacgtcccccaacccctgtcctgtgccttcctgcagccggccaccccctaagcatctctgggcacagcactttgctggctggagcctgcctggccgtcgtctccatctcccgtgtgggtgtctgcagttggacaccctccctcccgcccgccacccccctcccccccatgcctcagcagacggccagccccctcccgccccccctcccccccaccgtcccctgccgcctccctgcagcctctttcttcctcctggcaaagcgtccagccctgcctgctcctcctcgggcctgggcgcctccagcaggcacttccctccctccctctctccccagctgcctcctcctcttctctccccgctctccttcccctttcaccccatcccctgccctggctgcaaccatgagggtcttggcctgcctccttggtgagtgatccattctccttggggactcggggggcctaggcccccacctctgaccccttagcttgtccagtttagggactcaaacttccgggactggtcgctggtgctcctgcataccctgacatcccttctgaggatccctgctcaatctgcccagccttctgccagcccagaagcccaagggacctgccccctgcccgccccccagccctgaccctgcgggggatctcccagacatctgacctttagccaagcccatgtgtgtgtgtgtgtgtgtgtgtgtgtgtgtgtgtgtgtgtgttggggtattcaagatgaggggcctgcgctggagaaagggccacccccggcctgcccctcacactgccccaccctccgccctcccttccagcggccctggtggggatccaggctgttggtaagtgcccagactcctcccatctgcccgcccccccccccaggcctcccccttctgcccatccaggcctggcctcacccccactgggtccccggcccatccgaattccactgtgaccttggccccagctccgcaagggaatcccccaggtgtctggccgcatctctctgagcacccaggagtctgggcccaggggccagtgagcagggccactggcctacagacagtacctgcaggacagccacctgcccctacagttgccctggccttggggcccccaggatgcccctccccagtcacagccattcctccaaccctcagagcgcctgcgcctggccgatggcccccatgggtgcgctggccgcctggaggtctggcatggcgggcgctggggcaccgtgtgtgatgacggctgggacctgcgcgatgccgccgtggcctgccggcagctgggctgcggaggggcactggccgccccgggaggcgccttcttcggggagggggcagggcctgtgtggctcagcgagctggcttgccggggcaacgaggggcagctgggcctctgccaccaccggggctggaaggcccacatctgctcccacgaggaggacgcgggcgtcgtctgcgcaggtgaggacaccctggctgctccttcagggggagctcctttggagatgacccaggaaccccaagtccttagccccagcaagtctgagtgttcagcagttcagagacacccaacctcccatcccctccaaagccaggtggctaactccctcttccagggacccaaatggcctggattcccctcctctcctcatagcttctgtccctgcccccccgccgcaggtcagcgtgtggctaactccagggacgactcaacatctcccctggatggggctccctggccagggctgttgctggagctgagccccagcacggaggagcccctggtgacacatggtgagcccaggggactgccctgccaacccccacccagcgtgccctcctgccccccccgaggggagagggactgccctgccaacccccacccagcgtgccctcctgcccccaccgaggggagagggacctctgcagtatgaactcccaggggacacacagcccgccccctgccccgccccgtctccttcatagcctagggagtcctccatcacttcagaccctcagagacggaggcctgggcccccaggtgggaggaaggatgaggggctcagctcctgacccctggctgtctccactcccagccccccgcccagctgggaacccccagaacgcctcccggaagaagagcccccggcccaagcaggccaagtccacccgggcccctctgctgacgacaggagccccccgccaaggtaagctccctgcaggctcccccgaccccaaggctggttgctgtgaggcccagggcccagaaaaactgaggacctgcgggcgccctctccttagccggggccctggagggatcccagtgttccccgcgtccctcccccggggatttagacggccaggcctggtctcccctcttcttcctgccctgtcaggaggcccaggtgtcctggcccgctcaggtcgtggactcacctcttcacgggctgccggcggacagatctcaggccaccgctccctcaggcctgtttccccaggtggaaatcgaggaaggggtgtttgaatcatttctcactggccacaccgtcccctccctgctcaccccacagagcggctgcgcctggtctctggcccccacaggtgcgccggacgcctggaggtctggcacggcgggcgctggggcaccgtatgtgacgatggctgggacctgcgcgacgctgctgtagcctgccgggaactgggctgtgggggggcgctggctgcccccggcggtgccagattcgggcctggtgcagggcccgtgtggatggacgatgtggggtgtggaggaggagaacaggccctccgagactgcccccgaagcccctggggccggagcaactgtgaccacagcgaggatgcggggctggtctgcaccggtacgtcgggctggggcctggccccctcctgtcttcctcagaccccagctccctcttgcccctccaggaagctgcagcgggcctgctcccagctctgcctcctgcccgcctgctctctgcatgcccagcgcccactcaccacgctctccagcccctccttccacagctcctgccgttctccttgccaggaatgggaggagcaggcttgaggcttgggctagtgctcagccctgtcccggggcctaggccagtgaccgtttgtttaagcctcagttttcctgaaggagcgatggagctaagaatgcctgcctcaggcttgagccaagtcctggaacgcaagaagccctgcctgccctctgccaccgggctggccatggcaggggaccgtctcggagacctcttgtctctgtggccaacctctgctccttccccatcctcaagggagctggtgggaaggagggagggagggcggtgacttgggggcatggagggagactgaggcagggtggggacacccacgggtgagcctccatctcccctcattcacgccccctcagcgcggggtctcctcccctcatgtctcccagggggtccctcccctctcctgtaccccttggacctgggatagaacccagcaaacagcggttggggggtgttaggtgagagctcaggggctccctccctccttctctccttccttccttcctccctctttccctttctctttcctttctttccttccacaaatctttacacaccaccacggcaggccccaccctgctggactgcccgatccattgactgtaggaggccggcaggcagagggcacccacctggcatttcatcagcgttggggtggggacagtacacgggctgcaggcaaagctgggtgcctgcccaggatgggtaggaaatgctgacatcagtgggtatccaggggggagagaagagagaaagaggctgaccctagtctctgctgtatgctgggccctgcgctgtgcacgttacctggggccgctctgagcctcccgcagcccggacggggtggatcctcatccctctcttcacagatgtggggccgaggctcagagaggtgacgtaaatggcccaagacccaggtgcctagcaagctccagccccagccgctgacccctctgggtctgtatagacccacgctccatgcctgtcccactgcacagtcggccatagggacgtggtggggacacggaggtcagagtgggagtgagcagcagagaaggcttgtatggggtgggggtggtgccttcgtgtgcctagtgtacaagctgtgggggaagaagtgggaccttcggagcagagttcattggagggaagttgaggctctggagaggagagggtgaaggtgccaagaaaggaaacaaatgaactaaggcgcccggtgaagctgggagcttcgccagcatctgatttaattctcatggcaaccccgggagggagacgctcccctcccctgtctgcagatgaggaaaagcagacaggtgtgttagactcctccctagttctgtgctcttctctagaacagtgattgggggcaattctgcacctgcctcgttgggggacagagagagggactccagagtcctccaatgatgagtcaactcttaccccaacagaaatgtacccgaagagccaggcatggttacaggctaacacctgtagcccacgtgctttgggaggatttcttgaggccaggagttcaagaccagtctgggcaacatagtgagaccctttccctacaaaatataaaataaaaaaaaaatagcagggcatggtggcgcatgcctgtagtcccagctacttgggagaggctgaggcggggaggattccttgggtccaggaggtcgagactgcagtgagccaagattgcaccattgcactccagcctgggtgacatagtgagatcccctccccccaaaaataaaaaaatgaaatgtaccctatgtatcctaaggccagcgagaggttaatatctagactagtggctctcagctggcaagggagtgagggctttctcatccccttcctccccaaaggacatcaggcaatgtctggagacgtttttggttgtcgcagctagggggaggggttgccactggcatgtggtgggtagaggatgcagtgcaggacagttgccacgataaaggaggatgcccaatgccagtggtgctgagacttggaaatccggctctctaggatccgaggggccaggcatgggaggtggatccaggggaccagagccagagctcccagcgtccccagcccccaccgccccaaggcaagggatatgggggatgcgccagagttggactccgggccagtgacttcctgtcttggaaccttttcctcatttggatagtgaagatggaatatttgcttcccagagtcatcttggggttgcagcctgcctgagcatagcttagtccccgctcatccaccctcgtttcctggccctgtgctccctctcccactatccaggcccagcacctcggctgcgcctggccgatggcccccacgggtgcgccggccgcctggaggtctggcacgggggtcgctgggggtcggtgtgtgacgacgcctgggacctgcgagacgccgctgtggcctgccgagagctgggctgcggaggggcgctggccgcccccgggggcgccttctttggggaggggtctggacccatcatcctggacgaccttcggtgtcggggaaacgagacggccttacgattctgcccagctcggccctggggccagcatgactgtcaccaccgcgaggacgccggggccgtgtgtgacggtgagggggttgtggtggaggaccgggaggtgggcgtggtggtgcttggagcggaggggcaagttcggcgggggcgggggggtccctacgcgcccttcctgccctctctccggactttccactcccccatcttattcccctctgaatcctcaccctgcgtcactggttctcagctgggggtggctttgcccccaaggggacattggacagtgtttggaaacatttttgatggtcacagctgggggtgggggtgctcctggcacccaggggttagaggccaggggtgttgcttaggatcctgcagtgcacaggccgcctccacagctgagaacagtccagccccaaatggaaacagaggcgaggatgagcctcagccccgtggcagccctggctggccctgcctcctggcccccggcggaagccagccttctcctctgcataaggtcaccccccgcttctctgccacccctaagctaccatgccctctgctctctctgttcccgtgctccgcattcacacccctctccccaggtcagggatgtggaaagcgtgggctgtgtctagggaggaggttcggcaggaagagatctctgcgtgcagctgagaggactgaggaaggatgacgcaggaggtgggggtgccggctccgggatggagggtgtgtgtgggtggcaatcacttaccccctgctccacaggcatgcccctgggctacgtccctcccacggcccccacggacagcaacaactccacgcccagggaggctgcctccaggcccccgtccaccatgacgagccaggctccagggacggcaggcgtttcacctcctccagcctcccctactgtcctttgggagcctggaccggaagccggtgagtccctccatgctccccaagaaaacagggtccttccttctgtttccttccctcagctctgagactgtctcatggggggcctcttgcaaagagaaaggtggagaagaggagcacaggggcctcgcccaggacactgagctgggttcaatgctctgctgttgcgtctgggagcgtgtgataattcttgaacaaggggtcctaactttcgtcatttaccaagcccccaaaattctgtagccagtcctggataagagaaaggatgctgggctgagagtctgctctattcccaagctgcacggtgtggctgtaggatccatcatggggtactcaggccagcttcaaggaacagccctgctcaaacattacctttactttccagagtctctggttctttagcaaatgtgatcaatggttctgcctgcctcctttcatatatatatatatatatttttttttttttttttttttttttttgagagtggatttaattctgtcactcaggctggaatgcagtggtgtgatcatggctcactgaagcctcaacctctcaacctgcaggctcaagtgatcctcccacctcagcttcccaagtagctgggactactaattttttgtattttttttttttgcagagatggggtttgccatgttgcctaggctggtcttgaactcctgatcccaaaccatctgcctgcctcggcctcccaaagtgctgggattagaggcgtgagccaccgtgcctggtctctttcatgagtattgaaaggactgttgttttaaaatataggtgttattattactgaggtatggtgaggccaggatctcaggagatgacagccactaaaaagattgtgactgacggttctcaagaggatggcgtgccacacggggccacacagggaagcaccagggccaggcaggaggtagacggagtgagggggaagcatggcaggaatcttttatacatttatttagagacagggtctcacttggttgcccaggctggagtgcagtggtgtaatcacagctccctgcagtctcaaactgctgggctcaagtgatcctcccacctccgcctcctgggtaacacagctgcatgccaccgagcctggctattttttttttttttttttttttgtagagacagggcctcactattgtccaggttggtctcaaactcctggccttaggtgatcctcctgtcttggcctccctaagtgctgggattataggcgtgagccacccggccaggtgcaggggtctttcttgtgttttttgcaggaaggaataggtgagacaggttgagcaggcttagaactggctggtttgaagaatttcagtggggccggtggggagggtggcgactcagagggttgtccttagtcatctggtacttggccctggggcaatgaggacaggtgcagaatggcccagggtgtgagagcccagtggagagggtggtttgcacacgaaaggcatgctcaagccatttaccatctctaggaattagctaaccctgggaggggcagtccctcaggatcaggaatgctccaagatgtcaaagcatcagaaatacagaaaataaaaaggcgtggttaacacagctgtctcctcaagatgggaaaaggccgaacaaaagcagcaacttattttcaccatgatcaccattcccagaggtctcgttccccttttcctgaataataatatcagctaacactgaacgagcatgcactggctcctggtgactgatgctgttcccagttctctccgtgtctcagtccaggtgatgcttacagccactgtggtgtggatactgataggtctccatgttacagatgaggcagcaccgctgagaaatgggagagccaggattcaagcaaaaacacttgttccagggcgcacgttctttaaaaaacaattgtgataaaacatacatgacataaagtttaccatttttaccagtctttttttttttttttttttaaacagggtctcgctctgtcacccaggctggagtgcagtggcacgatcttggctcactgcaacctccgcctcccggttcaagcgattctcctgcctcagcctccggagtagctgggattacaggctgagccactgcacctggcccatgcctggctaatttttgtatttttagtagagacagagtttctccacgttggccaggctggtctcaaactcctgacctcaggtgatctgcccgcctgggcctcccacagtgctggaattaacaggtgggagccaccgtgccgggcctgctgctccctgtcttttaaaggacttcctctgagaagccttctccagcttcctcaggcagaatttttctcaccttctcctcgttgtgtgtctgccttgccctttgggtacttccactactccctttagctcgctgagctgtaatgaagtgtgtgcatgctactttccctgaagaccgagagcttttcaaagcagaggctgtgcctgactcataaacaacaacaaaacaccttattatccctggtggtctagtggttaggaaaataaaatctaagaaagaagaaaaaaacccttattaaaccaataataatgagagaaaattaagggtggtgaacaactgcatggaaaaagacttattttaattgaggtgacattcatgtaacataaagttaaccagtttaagtatacaacttaagtggtatttatacattcaaaatgctgtacaaccactactatttggctactgtgaatggtgctgctatgaacattcacatactggtatctgtgtgaatacctgttttcagtttattctgggtatatccctagtagcagactttctagattatatggtaatttgatgtgtagctttttgaggatcctccaaactctgcctgactcattatccctcatgcctaatgcagaaaatggcacaaaaaaggcctcatgaaatacttgctgcctggaggaaaggatggatgaatggagggaaggcctagatggatgagtggaaaggaagatggggggagggaaaggtggatgaagagtcaggaggctgggcggcttccccgactctaattctttgggtctcttctaccccagggtccccccagctgcgcctggtggctgggcccagcaagtgctcaggtcgactggaggtgtggcatgaccagcgctgggggaccgtgtgtgacgatagctgggacatgcgggattcagctgtggtctgccgggagctgggctgtggtggacctcagcagccagaccctgctgctggccgctttggctggggtgcgggccccatctggctagatgatgtgggctgtgtggggaccgaggcttcactgtccgactgccctgctgctccctggggaaagcacaactgcgctcacaatgaggatgttggggtcacctgcactggtaaggaggccctagctatctgttgactccaggagggcttcctggaggggaacagtaactaacatgggcactaacattgattgagtgcttcctaagccccagccctgtgctgggtgtttttgcacatataaccacattgaaatcacataataagtctagggtggtgtgtgttatgcccattttactgataaagaagctgaggcacagagaggttgggtaacttgctcaagatcacacagcaacaactaactggcagatctgggattcccactcagagaagcttctgcttcctcttccttccaggaatcaaggaaatttcccactaagaaaggagctttagctttcctacgatgaaaggaagcaggcagggcactgggagatggaaagaagccaaagtgagagccagttaacataaactcaggcaatgcctgttattaaattgcagaggctgagccaggtgcagggtcctcatgctgggctcatgaatggaatgaacatggtcttggtctttgaatagctcacagctcatgtagagaaatactctaacaaatcattgcaaacctgtgtgactcgttatagtttgaggttaccaagaccactgtcagactcaataatttgctagaagaactcttagaatcaaagaatctgttacactcagcgttatcgtttatcacagtgaaaggatacagattaaaatcagccaagggaagaggcgcctgaggcagggctcaggagacagtaggtgtgagcttccaactgtcctgtcccagtggagttatgcagacagcacttcattatcccagcaacgaagtgggacaacacacatgaggaactgccaactagggaagttcccccaagccttggcatccagagtgttcgtggggacttggccacgtacatgtggctgaccataaatcacactgttagcataggcgatctggcatggcccaagtgccccagggaaaaaaatctcttatcaggcaaggtgttccaaaggcttcgaagtcatctcccaggagccggggaaaaggcgaaacctttctttgggcagggttaatcctttactgcacacgtgtgctaatcagaaagatggaagatggagagtggtgtctcaaaggatggaggcatcacctctgctggaagctacggctcttccctctgtccccgtcttcctgagggccacgggggcaccacagaaggattctgagttcgggagtggcctgtcggacctgggtaccccactggtggtcagtaagaattgacagggaggtagggagacctgtcagaaggtataggaaatgaggccctgactcagagcagaagctgaggagatggagaggagaggtcaggtgtgaaagggtgagggggtcagttatgtccagattgtaaatgccaagaaggcgggggcagtgtcgggtttggcttgccataggctacccgagggtctaatatggtgtgtggctcataggaggtgctcaataaatatttgtgacaataaatgaatgaatgatgaatgaatgggaactgggtgagtgactggagagaaggaggggcctgggtagatgatcttgtcatcatggtgtctctgtcttctcttcctgccccactcaccttccagggcccccaggcctggactccatctcagaccccttcagctggagctggattcctggactggggagagatcgggatgcctggctcccgggagagctggccaccaagccctctgcaagtgtgactgccagtgttctggagaaaacaaccacgaaggccccagggaaaatgcctaagagtactaagaagtgggtgacaaaaaatgcaaagagaccaaccactcaacccccagtgatgccaaccacgaaacactccagggcccaaagccccccagacctaacctcacagaccactgcagcactgaccactgaggcctcccgaagacctacctctgagtttaccagaaggccgaccacggaggccccccagagatggacctctcacaccactgccacgctgacccctcaggccccccgagaacggaccactaagaccatggcaatgctgaccactcaaggcccccaagaaatgacctctgagtccactatcaagagtatccctcaggcctccctggagccatctgctgagatcccagaagggtctccagagtcacccaaagacccggccccctctcccagtgttagcaccactggggaatcaggtgagtggccgtgaggggtgtggggagagaatgggagaggctgaccctccctcctgacctaagggccttccacgcaggcctgttccgggttcgtctggccgatgggcccaaccgctgtgctggccggctggaagtgtggcatgccggacgctggggaacagtgtgtgatgacaactgggacctgcgggacgccactgtggcctgctgggaactgggctgtggaaaggtccggcctcgagtaggcaaaacccattacggccctgggactgggcccatctggctggatgacatgggctgtaagggaagcgaggcctcactgagcgactgcccctcgggggcttgggggaagcacaactgtgaccacgaggaagacgtggggctcacctgcactggtaccagggcatggcggcggtggtggggttgtcgggggtggccaggagaatggagtcagggtggggccaggtgacggcaccatggtcgactctaaagaactgggtatgaggggtcggggtggggagatcccagagttgctccagaagattccaaaaggggagggaagagcagcagcaaggacctctgagaaagaggatggggtcaaccattaccccaatttctccaaaggctacacagactatgacgattatcccccctggacctgggaccccacctcaagagaggacctggccaaggggactaccacagcgggggtacctggacacactctcccctggaggaccacccggcgcccgggtagctcctccccagcaataaggcgcctgccggacacaggtgagaggcctgattggggtggccatggagggcctccataaacctccattcgcttccctgcagggtttccagaaagacccttctcaatgagctggctgaggcctcggggcaccctggaaaggttttccttggctcctgagaccctaaacgcattacctccttgggctcaatggtgacacttcttcagagccaaggacaccatctaagagatcaggctaagctcagcaatcctgagcccatggccctcctgtaagccacacaatatgcaagcctggggccctcagtcaaacccacaaccaagggccattctgtcatcacatcatcgtccccaccccagctcccccagagcaagcgaaacctcacccattcttgaagctcacgctctggtccgggcctggtatggctcagaggtggggactcctggagtgcagcttctctccttaccctggccatcccctccctctggccagcagaatcagcctccagggccacagctccatccccctctgctctatggcctctgtcttgctgctgcagctccttccacacctgggaccacgccccgctttggcccccacatcactgtcaccacattcttctgcctttttctttgcctgtcttccttgtatccccatctctcaggatccctgcgaatccatctctgctcctgtttctcacttgctgttggtctctttttttcattatccatttctcaccctcatcatctctatctctgtattgcccaggatggagtgcagtggtgtgatctcagctcactgcagccttgactgcccgggcccaagcgatcctcctgcctcagcttcctgaaaaggtgggactacagatgtgcgccaccacacccggctcatttttaatttttgtagagacgggctcactatgttgcccaggctggtctcaaactcctgagctcaggcgatcctcctgtctcactctctcaaagtgctgggcttatgtctgggtttataagtgtgagccaccatgcctggcctcacttcattttccatgatcaaattctctatcttttcttctctgtgccaatctctttttgcctttcattttcaatttctcacactcgtctttatgccgtatttttttcatggtaatttcttttgctctctctcaccatctttctcattttttttctttcgttgtcagtttcatattcccatcatttctttttccctgtctttctttttcaatttctcaccctcattacatctatttctcactccagttttcgtggtcagtttctctttatttttttctcccttgtccttctgtctttttgtttcattatcagtctcacactctcatctctgtttctcacctagtttttcctggtcaatttatctgtctttccccctcagtctttcacttttctttcagatctcaccttcaccacctctgtttctcactccatttttcatggtaaatttctctctctcttttttgagacaggatcttgctctgttgcccaggctgaagtgcagtggtgcgatctcagttcactgcagccttgaactcccaggctcaggtgatcctccgacctcagcctcctgaatagctgggattacagatgcacaccaccatgcctggctaatttttttttttgagacagagtcttgctgtgttgcccaggctggagtgcagtggcgtggtctcggctcactgcaacctccacctcccgggttcaagtgattctcctgcctcagcctcctgaatagctgggattacaggcgtgtgccaccactcccggctaatttttgtatttttagtagagacgggtt[132 bp omitted]tgttgcccaggctggtctcaaactcttgggctcaagtcatcggcttgctgcggcctcccaaagtgctggaattgcaggcgggagccactgggcccaaactgtttctgtatcttccgtcctcttgtctttcactttcagttctcagcttcgccacctgcttctcactcgatttttcacggtcggttttgctatatcacctcatactctcatcgtctccatttctcactgcgttctctccccaggcccagcgctgtggtatcttttcctttgtctcttacggttgttttctgagtctccatctcccgcgccttccctgcagtctcccgcgtgctctcttctctctccccctcgtttctctcatggtcagcccccttccctccgtttctgtctcccgcgggctcctctgtccgtttctcaccgtccccgccgccctcgccgctccctcacgggaggtttcactccccacctaaggggcagcgtttctgtcctccctctgtgcccgtcgcagtcgctgtttctccgtcttctccctcccttccactctcccgccctgctcgccgtctggggctgcctgggtttctgcctctgtcgccccgcgccccgtacctgtgccctcctgagaggcccaagcctcccgctcccgcaggagagtctcgccgcaagcgtcctttcccgccttttttttttctggcgctcagcacgcatgcgcaggcgcggtgggcccgggaatggagggacgggatggggcaggcgttcatctgcctcgcacctcgtgacgtcacaggcgcgctgcgcctcctgattggccagccggcgcatcgcccgcagtaataatagctgggcgaagggcaaccaggccccaagaagcgggccttgaggtggggaaagggagggaggaagcaggccctagaggcgccgtgacttgggggtgggtgggctccagctgtgagttagagctatcattccgtttccagagccggaagcgggagctccgagaggtgatgctcctcgttcaaggactgccagggttgcagcgcctccctagcccatagcgccccctcgtggtggaggcgggcacgtgccgggcacagcggctgcggagacagcgggtccggcctcgggacccctcccgtagggtagggaggcagccaatgagcagaaataaatgcagaatcacaaactgcgccggtgaaatgaaaagacagccatgtgtgccaccttatcaataggaagacttggaggcgtatgcggggtggagtgggagacgaggcaggcatgcattcttagcttcaggagcaatgtaaccttgaaaaagtgacttggtctctttgagtccccgtttcttatttatattgttttatttatttattatttattgagacggagtctcgctctgtcacccacgctggagtgcagtggcgctatctcagctcactgcaacctctgcctcccaggtttaaacgattctcctgctgc[134 bp omitted]ctcccgaagtgctgagattacaggtgtgagccaccgcgcccggccacctgtttctttctctggaaaaaaaatggggcgccagggttgttggaaaggtggaacgagagctcacctagtctgtgctgggcatgcatgaccccaacttcaggccatagaaactgttgctacacctgtgtttcagatggggtaaaaagtgaggctcagagaagtttaacttaggagccacgattataacctgttttaagtgatttcacacgttttgctccttggattgggaaccatatgctaaaatagaagcacgagtctggagtccgactctcctaccaggttccaatcgtggttccaacccggattagaactagttgggtgactgcaggccccaattcaatgaacaaaatgtgtgtgaaatcgtttaaaaccgcagaatattgtttgttagggttatttgctgaaaacgaacaacagctgcaggatttcagggaacgagcgattatttgtagtagagaaatcaaggaaacctcacaggggagatgatattatttcatcagcaggccacaaggagaaatgaattctcagagaagcaaagggtgggagaaatttgcattgccagaaattttcatcggtgttatccatctctgctagactttaagctctgtgaaagatctgtatctatttcaattgctgccataatacatcgccacaaatttagtggtttaaaacaacgcagacttattattttgcagttttgtaggtcagaagtcagacttgcttagtgggctaagatcaaggcgccagcagggtggttccctttggaaggctctaggggagaatccatttccctgccttttccagcttctagaggccacctacattccttggcttgtggctccatcccccatcatcaaagccagcaacattgcatctctctgacctttcctctgccttcgtatttttctctctcactgtggcttgaaaggttctctgattttatttatttatttatgagacagagtctcactctgtcgcccaggctggagtgcagtggtatgatctcggctcactgcagcctctgctgcccaggttcaagcaattcttatgcctcagcctcctgagtagctgggattacaggcgtgtgccaccactcccggctaatttttgtatttttagtagagatggggtttcaccatgttggccaggctggtcttgaactcctgacctcaggtgatccacccgccttggtcacccaaagtggtgggattacaggcgtgagccacggcacccagccagttctctgagtttaaggacttagattggggccacttggctaatcaggataatttctccatttcaaggtctggacccttaattacatccacaagtccccttttgccacgtaaagtaacatattcacagtttctgtggattggggcacacacatctttgggcgaggggcatattatcttgtctatcatggatctatctggaatccctagtgtctagggcagtgcttgaaactcagtagttaatttttatgttatttgttaaatgaatgaacaaatgagagatgacattgtaagtctaagagacactggagatgagattggaggcctgtggaat[138 bp omitted]gcctc[224 bp omitted]ggatgatggagtttggagatacaaacgtcagttcatgtgtcaaatgcctactgtgtgacagagcatgtactaactactgggaggtagtgttagggagcaaagcaggggaaggggcaggggagactgagggttgcagtttaaaataggatggccaggtgtggtggctcatgtctgtaatcccagcacttagggaggctgaggcagagggatcgcttgaacccaggagttcaagaccagcctggccaacatggcgaaaccctgtctctactaaaaatacaaaaaaattagcctggtgtggcggtgcatgcctataatcccagctcctcgggaggctgaggcaggagaatcgcttgaacctgggaggcggaggccacagcgagccaagattgtgccactgtactccagcctgggtgacagagactgtctcgaaaaaaataaataaataaaaataaaataaaaaattcaccaagcaggggcgtgctcctgtagttccagctacccgggaggttgaggcagaagaatcacttgggccctggaggttgaggctgtagtaagccatggtcaagccactgcactgcagcctggatgagtgagaccccgtctcaaaaaaaaaaaaaaaaaaaaaaaggatggttaagagacattttacgggccgggcgcggtgcctcactctagtcccagcactttggcaggctgaggcaggtggatcacctgaggtcaggagttccagaccagcctggccaacatggtgaaatcccgtctctactaaaaatgcaaacaattagccgggtgtggtggtgcatgcctataatcccagctactcgggaggctgaggcaggagaatcctttaaacccaggaggcggaggttgcagtgagccgagatcccgccactgcactccagcctgggtgacagagcgagactccgtctcaaaaaaaaaaaaaaaaaaaaaaagaaaaaaagagacatcttactaagaaggtgccatttaagtgagaaggccctgaggccctgaggtgggtgcatgctctgctggttcaagaaatagcaacaaggtggatgggactagagcggagtgttgggtggaaacggtggcagcgggggagatggggaatggactgtaggggccagcgtggatgcagggagcccgggaggtccaggggagagtgacaatggctctgatcagggtggcagtggagaccaagggagatgtggatgtattcaagccatattctggggtttgagctgatggagctgagtgatgggttggggacagtgaggagagggaggcagggaacgggtaccttttaccaggtcggggagctctgtgaggtgggggcacagcagccagagtggggatatcaggagatattagctgtgcatcctggaggtccagggagcgcctgggctgaggatataacttagcgagatggaatttgaagctgtgggagtggatgtgactgcacagatagacagctgtgtctaatgtagttcccgccactgccagctgggaagccggggagacccgtgcttggggtatcgccggaggtttatcaccctatgaggtcatgcagggagaagaggatccaggactaaatatgagattaactttagaggttggatgatgatgaggataatggtagctgctattttatcgcgtgctctccatgggccaggcgctgttcaaagtgcatcctgtggttacactcccttcctccccatgcagccttgtgaggtgagtcctatccttagcttgattttacagataaggaaactgaggtagggagaggtcaggattgcaaaaggctgaacttggattcagactccagattccacacccttgctggctctagccttggagagtgggaaggacagaattaggtctgtagaatccagggcgcatgcagcagggatggcctcatccacaggggatggggggaggcctcctgagggcatggcctgtggactaactcctatacagcagggatggcctcatccacaggggatggggggaggcctcctgagggcatggcctgtggactaactcctatacagcagggatggcctcatccacaggggatgggggaggcctcctgagggcatggcctgtggactaactcctatacagcagggatggcctcatccacaggggatggggggaggcctcctgagggcatggcctgtggactaactcctatacagcagggatggcctcatccacaggggatgggggaggcctcctgagggcatggcctgtggactaactcctaaaggatgaataaaggcttgccagggaaggaaggggtgagacttgggagatatgtacccagagggaaagagaaccatttagaaccaggtagatctgctggggtctggagctggatgctgtcccttagctgtgttaccccaagaaagtttcttgccctctctgggcatcagtttggccatctttgtgaatcagcagcctccccagccaccctctccccataagaccagcaaaaatgacaccgtctggcagcatgaaggctgtaggataaaggtgtgagtgaggatccccatgcacttagtggggcaggttcgcagtatctaaggagatacatctgcttccatacagcaattccacaacgaggcgtcgagaaattctcgcccatgagcctaaggacatgggcacaaagagttcactgaagccatatttgtgacagcaaaacactgggagtaaccgaaatgcccatcaacaggagcatagattaatacccagctgtatatccatgcaatcgagtagtacgtagaggttcacagaatgagccagagttatgtgtatctttttattcttttttttttttccaagacggagtctcacgcctgtaatcccagcactttgagaggctgaggcaggcagatcacctgaagccaggagttcgagaccagcctggccaacatggttaaacactgtctctacttaaaatacaaaaaaattagctgggcatggtggcaggcgcctgtaatcccagctactagggaggccaaggcaggagaatggcttgaaactgggaggc[132 bp omitted]agatttccgacagtgcattctgagagtacacaggaggctgccattttaaaaggaagacggcttcaatttgtgttcttttttttttgtttttttgtgacagggtcttgctctgtcacccaggctggggtgcagtggcatgatcacagctcactgcaacctccgcctccaaggctcaagtgattctcatgcctcagccccccagttaactgggactactggtgtgccccaccacacctggctaatttttgtaatttttagtagagacggggtttcaacat[135 bp omitted]catcttgaaaatacatctttttggtttttttagatggaattttgctcttgttgcccaggcttgagtgcagtgacatgatcttggctcactgcaacttccgcctcccaggttcaagtgattttcctgcctcagcttcctgagtagctgggattacaggcatgttccaccacgcctggctaatttttgtatttttagtagagatggggtttcaccatgttggtcaggctagtctcaaactcctgacctcgtgatccgcccacctcagcctcctaaaatgctgggattacaggcgtgagccaccatgcccagctgaaaatatatctttagtgattcactgctaatgggtttttttccctggactattttttcttttttcttttttaattaatagtaccactaatggtggtgtttttgtttttgtttcttggtttgcttttatgtttgtttgcttgtttgtttttgagaaggagtctcactctatggtccaggctggagtacagtggtgtgagctcagctcactgcaacctctccttcatgggttcaggcgattctcccgcctcagcctcctgagtagctgggattacaggtgcccgccaccatgcccagctaatttttgtatttttcgtagagacagggtttcaccatgttggcc[131 bp omitted]atatctggtaggattttatagctacccttttaaggtgtctaatagaaatggaaaggtatttgattaagaatggttaataatacgaaggcatgacggaggtgtctgctgtgcctggcatcagggtgaaatttgacccttgttctatcagcgtgcagtgtcttagcaggtaacggagcaagggatttctgtaattgggaccactagccacagagcttaaggcgacatcggtcaacttgcccaaggtcttggacactgcccttctgcctggttttgcgtttggaatgagaaaacatcctaacgggctcagttgggtaggaaatgaagaggaagggaattcggggtgggggcggcagcgtgggcagaggctgggaggtgtgaaaagcctgcgcgttgtggttgttcccagtgttttgctgtcacaaatatggctgctatgaactccttgtacccatgaatccctgggctcatgggtaaggatttctcagcacctccttgtggaattgcttgtggaagcaggcatgtctccctaaacactgcaaacctgccctcctaactcaaggtcagggtccagcgtgagcagagcatcgtgtaggacgagacgatgctggagaagctggcaggggctggttatgaaggaagatggtgtctgtgggccgtggggactcatggaagggtttagggtggaaaggggcaggtgtctgccagtttttaagaggcctccaggatcagtgtggggggccagggtctcaggggaagttggtttgatgattcggataggcaatgagtatggagtgttttgttcgggtgatgaaagtgttctcaattttgattgtggcgatggtcacgcaagcttgtgagtgggtaaaccccctcagttgcaatttcaagctgatgaattgcatgatacgtgacctgtatctcaaggaagctgttgttgaggccgggcacggtggctcacacctgtagctcactttgggaggctgaggcaggagaatcacttgaccccgggaggcagagcttgcagtgagccgatattgcgccactgtactccatcctgggtggcagagtgagacttggtctcaaaaaaaaaaaaaaagaaaagaaaagaaagctgttgtttgtataaagctaggactgaattatcattctattctccctaaataaaatggcatacatatatgtatatatattatacatttatatgttatataaaattgctattatatagagattaagtgcatttggccaaaaaaaaaaaaaaggaaaaatagtattatagagatgttccaggcagtgaattaataaagatgttatggtttttcccccgctagggcaggagccttgaggaattaaaataataaattcctttttttttttttttgaggcggtgtctcgctctgtcacccaggcaggagtgcagtggcacagtcttggctcactgcaacctctgtctcccaggttcaagtgattctcctgtctcagcctcccgagtagctgggattataggcgtgtgccaccatacccagctaattttttgtatatttagtgcagatggggtttctccatgttggccaggctggtcttgagctcctgacctcaagtgatctgcctgcctcagcctcccaaagtgctgggattacaagcttgagccacggcgccaggcccaaatgcccttcattttatgtgctagtttagtgaccgtttccgtcgttggtagccaaaaacatcccagctgaatggagaaggtctccacgaggtcaggtagggctgcagtggcggtgcagttgagacgggatgatgcctgaactggggctggcccaggaggagagagacggggagtcaaactcaaagggaagttggaagactcaatcctcttccccatatctctctaggcagcaaagatggttacaagcttccctggacgtgggacacaccatcaggaaggggcctggctgaggggacccctaccgcaggcaaactaggaccaactcttggggctggcaccaccaggagcccaggcagtcctccaactctgagagtccatggagacacaggtgagacacgtggctggggtgaggagactgggacggtatttgtcctggggtaaagagacagattccagactccccactggaacccttaccccagaaagactcagcagaaatataccctaaaacaaagggttatcggctgagcatggtggctcatgcctgtaatcacagcactttgggaggccgagttgggaggattgcttaagctcgggagtttgagagcagcctgggcaacatggtgagccccccaagatatgaacattagctgggtgtggtggtacgcacgtgtggtcccagctgcttgggaggctgaggcaggaggatcccttgagcctgggtgctcgaggctgtggttgtgccactgtattccagcctgggtgccagagcgagaccttgtctcaaataaagacaaaaacagaaccaagaggttattatctagaccgctggtcatcaactagggtcgattttgcccccaaggggaatttggcaatatctgaagatattttggattgtcatggcaggaagtgagaggctacccattggcacctgatcggtagaggccggggtggtgataaacattcacaatgcacacgacattccccataacaaagaaccacccagccctaaattacaatagtaccgaggttgagaaaccccagcctagatggcataagtcactgtgacaaataggaaaatgataggaaaccctagatgagaaagaggaaaacaggtgattcccagaaaaggaagcccaaatggctgagtgtatttagaaatgcccacgctcatcaggaaccagaaaatacaaattaaaacaatggcaagtacagaggagaatgagaaaggtgggtattatccagtgtgagtgaggatgtgggaagacaggcaaccccactggacagagctgtttgataaagacaatccagcagtatttagtaaagttaagcatgattaggctggct[137 bp omitted]gtggtaggcacctatggtcccagctactcgggaggctgaggcaggagaatggcgtgaacccaggaggcagagcttgcagtgagccgagattgcgccactgcactccagcctgggcaacagagtgagactctgtctcaaaataataataataataataataataataataataataataataataataataggtgtggtggcaggcgcctgtaatcccagctactcgggaggctgaggcaggagaactgcttgaacctgggaggcggaggttgcagtgagctgagatcgcaccactgcactccagcctgggcaacagagaaagactctgttaaaaaaaaaaaaaaaagagagagagagaagaagggaggaagggagaaaggagggaaggaaatctgcatgagctccatgacgtagatctataattttgcccatttctcagatgagtgaaattgaggcacagacatcagtgactctgacatcaataattattagagtgcttattccatgctagacattacactaagtgctttgcacaaccatggtctccctgagtccttttgacagctctgcaagggagatacgcggatcatccacagtctatagctgaggaagaaactgagattcaagcagtgaagtaacttggccgtggtcaccccgctaggaagccatgcagctggggtttaaactcggacagcctgccttgagcacaagccctttacttaaccgcttctccaatcctgcaaacaaaggacaaggtggggaagggatgcgcctgaaagaccctgccctgcaggaacaagtggaaatctgtagatctgtgtggttcaatacggtagctaagagcaccgggcatggtggctcacgcctgaaattccagcactttgggaggctgaggcaggcagatcacctgaggtcgggggttcaagactagcctgaacaacatagtgaaaccccatctctactaaaaatacaaaaaaattagctgggcatggtggcacatgcctgtcatcccagctactcaggaagtggacacaggagaatcacttgaacccaggaggcggagattgcagcgagccaagatcgcgccactgcactccagcctgggcaacaggagtgaaactccgtctcaaaaaaaaaaaaaaaaaaaaa[133 bp omitted]tgaaaccccatctctactaaaaatacaaaaaattagcaggacatggtggcgagcgcctgtagtcccagcttctcgggaggctgaggcaggagaatggcatgaacctgggaggcaaagctggcagtgaggcgagatcgtgccactgcactctaacctgggcgacagagtgagactccgtctcaaaaaaaaaaataaaataaaataaaagaaaatgaaacatttagtttctcattcacactggccgcatttcaagggcttggtagccacatgtggccagtggctactgtattggcacggtagatcacagcgcattcccatcactgcagatgtgagatttcattgcctagactctatgtgcaaacaacttgggttcaagtcttagccctgcaacttgcaaactatgtctgtgtgaccttgggcgagtcacctgccctcttgccctaatttcccccttctgtaaaatggggataaaattggcactcacttggaagacagccccagaagagggtcaggctcctcctgctactcaggcccaaaatttaagggggtgcccaaaacgccaaaatcaagatacataatatcataatacagtattttttaaaatgaaaattaatgccaaaaaaaaaaaaacccatgatgaactcggtatcaaaaatgtaactgaaggccggg[175 bp omitted]gaggc[138 bp omitted]gctgggctccccctaatcctggccctgttggatcccgtctttggttaaaatgttaactttggttaactgtggatcttttggattaattttgattgtttaaaaatattgcataaaaacgcttgagcccaggagttcgaggttacagtgagctatgatcttgccaccgcactccagcttgggcgacacagccagactttatcttaaaaaataaaaaaatccataaaagtatttattttgattactaacattacccttcggagccctctttggtctccctgcctcccctggctccgcacatctcccagtcccccgctggctcagaatcctcccgtatgctgcacgcttctgagcactcccgccccctcccgcaccccagcaccccacgcatccctccctcacctcaccctcctgcacccgctcccgcaacccgcgtgcccctcggcatccccgagtccggagcatccccgcatcctcccgcagtggaggacgccaggtggcgcctggagccatcggaggacgtagggaggaggggccctagggccgggtgaagtctgccggtgacccatgacgtctcgaggctctgtgcctttccattggtcggctcctcgaggggcggggcgggacgcgtggtgggcggagccggttgacctcagaccgtccgtctgtctttcctcctcctccaggttccccgaggaaaccgtggcccgagcgccggccaccgcggcccgctgcgaccaggacagcgcccccaaccccgtccccaggtccctccgcctctccgggacccccaggcccagcgctgacctctgactccagtcgagagctcactccccactcagccttgacgtccgaggcgacctctgacgctccggacacttcaccacccaccccagacccggcctcccggacgaaccccgacctcatcttgacaagccctgactttgctttgtccacccctgactccagtgtggttcccgcgttgaccccggagccctcacccacgcccttacccaccttgcccaaagagctgacctctgacccttctacaccgtcggaggtgaccagcctttcccctacctcagagcaggtcccagaatctgacacaaccccagatttggacacaactccatactccagtacagtctcagaatattctagatccccagacccctccccaagccctcaccccactactacccctgatcccaccatggcccctgaccccatcacaacccttaaccctactgtgacccctcacttccctaccacccctcaccccaccacgacccctcaccccaccaccatcactcactccaccatgattcctgaccccaccacaacccctcaacccttcaccaccatcactcactccaccatgattcctgaccccaccacaacccctcaacccttcaccaccatgcagcccaccacaacccctcactccacaacccctcaccccaccacgacccctcatcccaccaccatcactcactccaccatgattcctgaccccaccacaacccctcaacccttcaccaccatgcagcccaccacgatgcctcatcccaccacgacccctcaccccaccacgactcctcaccccaccacaacccctcaccccaccacaacccctcaccccaccatgactcctgaccccaccacgaccccttaccccaccactactcctgatcccaccacgacccctcaccccacaactcctgacccttcctcaacccctgtcatcactactgtgtcccttccaacctccttggggacagaactctcctctcccactctagcaccaacagtcaagcccagtctgcacccccagttgaccttcacagcacctgcccctcacacctccacatcccagatacccaccttagagccctctccagccttggagtccagcccctccaggtcctccacagccacaagcatggacccactgtccactgaggacttcaagccacccagaagccagagccccaacctaacccctccacccacccataccccacactcagcctctgaccttactgtgtcccctgaccccctcctttcccccacagcccaccccttggatcatcctccccttgaccccctcaccctagggccaactcctggtcagagcccaggcccccatggtccatgtgtggccccaacaccacctgtaagggtcatggcttgtgagccacctgccctggtggagctggtggctgctgtgagggatgtgggtggtcagctgcagagactgacccaggtcgtggaacaggagcggcaggagcgccaagccctgctgctggggctgacgcagctggtagaagctgcccggggtctggggcagctgggtgaggctgtgaagagactggcagagatggcctggaccaccagcatgcctgcaccaaccaccactaccccagaggaagaagaaagacccctgaggggagacgtgtgaccctctccaggatttgaggggcttaagacacccccaaccaaaaaaaacaaaaacaaaaaaaacccccaaagtatctaattaaaaacaaggtgtgaatggtatttttggggaatcctagaaagacagaatcacaagactgattttgatatgtgaatagcccaggtgccatgccaggcggtgttgatgatggagatgattatgagggtggtgatgatggtgatgatcgtgatggtgatggcgacggagatcatgatagggtgatgatcattgtggtgagggtcatggtgataatggtaagatggtggtggtgatgaagatggtgaaataatgctgatgatcatgagggaatggtcatggtgatgaggcggtgaacatgatgatgatgattatcatgatgatgatgatggtcctggtcatgagggaatggtcatggtgatgaggcggtggacatgatgatgatgatgatggtggtggtgatgatgatgattatcatgatgatgatgatggtcctggtcatgagggaatggtcatggtgatgaggcaatgaccatcatgatgatagtggtggtggtgatggtggtaattatgatgatgatgatgaagatggtgaaatgaaggtgatggtgatagtgatgattgtgagggaatggtcatggtgatgaggcagtgaccatcacgatgatggtggtggtggtgatggtgatgatggtggtgctggtcatgagggagtggtcatggtgatgagggaatgatggtaatgatgatgatgatggtggtgccggtggtgatcatggtgatgatggtcacattgatggtgacggtgatggtggtagtggaggtgataatgatggtgtgaaaggtgatcatggtggtgatgactgtgaaggaacagtcttggtgatgaggcaatgatggtaatgatggtgatggtgatgatgttggtgattatggtggtaaagatgatcttggtgacgatcatagtgatggtcgtgacaatgatgaagcttcgtgtgagcaaaaacggccttgttcatggatgtaagcccagtttctaggacagaagctgatgcagagtacacactcagtaataaatatcttttgaatgaaagagtgcatcatcatcgtcatcatcatgactaatatttgttgggcgcttcctatgtgtcaggctctgttttaagagctttgcatggatgatgatgtcattttgtcttaacgagtgcctgctgaggaaggtagtgttaccacagctcagcagatgaggaggtgagctttgcagcctggattcctgagtttgagtccttgctgggagtaaacataagccagttacttaacctctgggtctgagcttctccaactataaaacagggataataatagtacacatacctcatggggttgctataatgattgaataagttaatacctaggagagtgcttatgatggctcttgataagcgcccgtcatgtgagagcaattattgtatttatccccattctgcagatctgggcttcgaggcacagagaggtttggtcgtgcaccccagatcactcagggaacacgtggtgggccatgcttggcactcagggcccttgctcttaaaataatattttggctggccatagtggctcatgtctgtaatcccagcactttgggaggccgagatgggaggatggcttgaggcctggagttccagaccagaaatatagtgagacccccatctttattaaaaaagaaagaaagaaaatattccacggctgtgtcagactgacctgggttcaagtcctggattaaccatgtcccggctgtggaactctggcagtttccctcccttctctgagcctcagttttttcacctgtaaaatgggtagagcaatagcacctgcctcatggggttgtgaggattaaatgtggcagtgcagataaggacaacgtggcatgtaggatgtgctcagttaatgacagtgcttgcgaccacgcctgcctgtacttttctgtgctaacgctgcatggactgttaatccacgtacatccagtcctcaccacagccctttgagggagaaactttgatccccgtttcagaaaggactctgaggctcagagagggcaggcccgttgccaaagggcacacggcagagccagggactcaaaccctgaatactgtgatgtgaatttccgtgctttgaccatggcctgcgtttccagattggggcttccatgactgccccactccaagcgaccgtgggtgggctccttcccatctctgtgcctcagcttgctggtttgtaaattgggggccgtctcggaagaccccactactctgattctgggtcctgcagcctcaagcaggaaaccatttcctcctcctcctcctctctcggcttagaggtcgtggaaggtgatgaaggctggcgcccccacagtcctgcaaaggccaacagggtccagttacttgggcgggggggtggcggggtgcggataacgtctgggggtcctgatagatggacggtctgctcctgccagcgggcgaaggagcatgctgagaattctgttccccagatctcattaagccctgagacttaaataactgctgactggttccctggagaggctgaggggagagcttctgccctggggagatggggggtcacagggcagcaccccaacatggaagaaaacggctccttttccaggtccaggtgggagcagatgaacgct[450 bp omitted]cagaacaaagttggagcagagaggacttcttcatcagataaggggtacgaaggaagacacgtatctttgattttccctgggcaatggatgtgatctcctatgagcgctgacacaggaggccccgaagaacgcagcaggtaagcggtttgcgtgagtgagagctgggcccgatgctggatccatactctaaagtcatctcacattccttgcacctcaaaatgtgacccacgggcctgcagcattggactcatgtggaagctgtttacaaacacggaatctcatgctctgcctagagccaccaaagcaaattctgccttttttttttcttaactttttttttttttgagacaaagtctggctctgtcgcccaggctggagtgcagtggtgcgatctcagctcactacaacctccccctcccaggttcaagtgattctcctgcctcagcctcccaagtagctgggattacaggcgtacgccaccatgcccggctaatttttgtttttgtttttgttttcttttttttgagatggagtctcgctctgttgcccaggctggagtgcagtggcgcgatctcggctcactgcaagctccgcctcccgggttcacgccattcttctgcctcagcctccggagtagctgggattaacaggcgcccgccaccacgcccggctaattttttgtattttttagtagagacggggtttcaccatgttgaccaggctgatcttgaactcctgacctcaaatgatccacccacctccacctcccaaagtgctgggattacaggtgtgagccaccacacctggcctttttgttttcttttcttttgtttttcttttgagacagggtctcactatgttgcccagcctggagtgcagtggtataatcacagctgactgcagccttgacctccagggctcaagcgatcctcccacctcagcctcctgagtagctgggactacagatgcacaccaccacacccggctaatttttgtaattttgtagagatggggtttcaccatgttggctaggctggtctcaaattccccacctcaggtgatctgcctgcctcggcttcccaaggtcctgggattacaggcataagccaccgccccagcccatatggtagactattcagtgtacaatagcatcatgtctaaaaaaaagtatttaatctgggcatggtggcacgtgcctgtaatcccagatacttgggaggctgaggcaggagaatcgcttgaacccaggaggcagaggttgcagtgagccgagctcatgccattgcactccagcctgtgtgacagggcgagactctatctcgaaaagaaaaaggtatttaattacatactttaattaaaaatactttattgctaaacatgctaatgaccaccggagtcttcagcaagtcatagtcgttttgctggtggaggatcttgcctcgacgttgatggctgctgactgatcagggtgatggttactgaagcctggggaggctgtggcaatgtcttaaaataagacagtaatggagtttgctgcgtcaattgactctttctttcatgaaagatttctctgtagcatgcaatgctatttgatagta[306 bp omitted]gcgtggtggcgggtgtctgtagtcccagctactcgggaggctgaggcaggagaatggcatgaacccggaaggtggagctcgcagtgagccgacatcacaccattgcactccagcctgggtgacagagcgagacttcgtctaaaaaaaaaaaaaaaaattaaccaggtgtggtggtgtgcacctgtagtcccacctacttgggaagctgagatggaaggatcacttagcccaggagatggaggcagcagtgagctatgattgtgccactgcactccagcctgggtgacagagcgagaccctgactctaaaaaatttttaaaaattgagttaatcttctccaacccggctgctactttattaactaagtttattaacattctaaatcatttattgtcgtttcaacaacattcacagtatcttcaccagaagtactttccatctcaagaaaccactttttttggtgctcattcataagaagcaactcgtctgttcaagtgttatcatgagatggcagcaatttaatcacatcttcaggctccgcttctaattctagtttcattgctatttgtaccacatccgcggtgactcctccactgaagtcttgaacccctcaaagtcatccataagggttgaaatcaacttcttcctaactcctgttaatgttgacattttgacttccttctctgagtcacgaatgttcttaatgacatctagaatggtgaatcctttccaggaggttttcaattgactttgtccagatccatcagaggaatcactatatatgacagctatagccttacaaaatgtatttcttaaataatgatacttgaaagcaaaattactaaggccaggtacggtggctcacacctgtaataccagcactttgggaggccaaggaaggaggatcacttgacgtcaggagtttgagaccagcctggccaacatggtgaaaccctgtctctactaaaaatgcaaaaattagccaggcgtggtagcgggtgcctgtagtcccagttactctggaggctgaggcaggagaatcacttgaacccaggaggcggaggttgaagtgagccgagatcgtgccactgcactccagccggggtgacgaaaacaaaactctgtctcaaacaaacaaaaaacaaaaacaaaacaaaacaagaaagaaagaaagaagcaaaaaagataatacaaactctcaataaactagttgcccaggctagtctcaaactcctggcctcaagtgatcgtcccacctcagcctcccaaagtgctgggattcaaggcatgagccaccgcgcccgcccatgcttttatattctttcacacacgtgcatgctttctcatacagtgtcttgatctctcacacatagtctcataatctcacactcatccttacactcacatctacacctgtactcaatcaaacgtttatgttcacccccacacatacagctcgctcacgctcacaagcttactccctcatgcacactcacaatcacccgcacacacaccctcacccccacccgcccactcacccacacccccgtgcccccaagcccctcctcccgctgagcacggcaggacatccctgcaggttaacagcagggaccatgtgctggagcccagctgggttcgactccaggctttgccccccggcccggtgtgtgggcacggcgggaacctggctgccccgtgcgtgagatgggcagagcccagggacccccgccaccatcttggggacaggtcggggagcagacgtggcctctgagatccctggttggggttcagcctccggccagcactaagcattacttaattagtgtcgtccctgcctgcctgcctgccggggtcaggccattcctgggaagtttatgtcctcccctgtgcttcacccatgacaggctggtcattatcacctttcagataatcctcagctgccgccagcaatcaacacctcgtgcccccctgccccctgcccagtctccactcccacccagcatgccgcatcccagccacctccagctttttgggacacattcttggcctaacagctcaggctatttcagattcacagataaaggggcaggaagtcttgatatattccacccccaccccccaccccccgcgttgttgactcccctcttctccccaatgatccctactccaggaagctcacccggattgtccaggtcagaggccccaactctatggcttgaacctggattcgaaggctccttggggtcactccacaggagcacacctgctgtcagccccgctccaggcaacacctcggtggccacagcaggcgccctgcggggtatgcaggggccagggagtgcgtgacacacgatccagctccgagttgtagccttgctctgggcctgaggccaaggagggcgcggagaggaagagacagtgtttgcaaacagggcagctgccaagcaggggcgggggagagaggaggaaggtgcgaaggagagaaggcccaggcggcgcccgcccgcggcgcctgcgtgaccttcccaccctggctacacattgacaggcatatgcgcgcacacacacggatccgatgtccacacatagcaagtcacattcactccccatacacacaagtacgtcagcacacacaagctcagatgctcatgcagacacagcaggcacaaagctgtattatcatccacgtgcagtgagacacacaacgccatcctccctcctttccatgcatatgcattcacacacgtgcacacacatgctcacacatgcacactcacactggcgtacacatactcatgctcacacatgacattcacacttgcacacacgtgcacacacacttatgcttacacatgtacactcactggcgtacacactcatgctcacccacgaatttacatgtgcacacatgtgcacactcatacatgcacacacattcacacttgcacacatgcacacacacatactcgtggacacatgaatactcactggcacacatactcatgctcacacatgacacacacttgcacacatgtgcacacttgtactcacttatgcatatgcatactcaatcgcacacacacgcacacactcacacacactcatgcacaggacagtcacacttgcacatatgtgcacacttgtactcacacgcacgcacacacattcatacttgcacacatgtgcacacacacgcaagtcatggacacacacgcacagtcactggcgtacacactcatgctcacccacgaatttacatgtgcacacatgtgcacactcgttcacacttgcacacacatgcacacacatactcgtggacacagatgaacactggcacatgctcacgtatgacattcacacttgcacacatgtgcacacttgtactcacatatgcatatgtatacactcaatcgcacacacactcatgcacacaggacattcacacttgcacatatgtgcacacttgcacacacacattcacacacattcacacacatgtgcacactcacgcacacacacatactcatggacacacatgcacactcacactcatggacacacatgcacactggcacacatacgcatactcatggacacatgcacactcacactcatggacacacatgcacactggcacacatacgcatactcatggacacatgcacactcacactcatggacacacgcacactggcacacatactcatgctcacacattactgacttgcacacatttgcacacacatgcacacactcacaattgcacacacgcgcacacactcgcacaatgtgcacactcgcatgcacgcacactcacactcagacacgtgcacactcactggcacacactcatgctcacgacattcacacttgcacagatgtgcactctcacactcatatgcacacgcatacactcacacacatgcacactcacacacactcatgcacacatgcatatagagttccttgatggaagctttgagaaccatatctttcattccattgttagcacacaaactttggtttggtaaaggagagggattcttagaagcaggtggctcactccctcctgcccacagctctgccatcaggaccccctgcaggacagcagggaggctcaggcagcaccatgagctcaggcagctcatcctcgcccctccgtctctctctctcccttcctctctgtctcttttctgtctgtgtctctcttcctgtgtttgtctctctccatctctgtttctctctctgtctctgtctgtttctctttctatctctgtatgtgtctgtgtctgtttctctctctctcttcctccacctgtttctttttgtgtgtctgtttttctatctgcatctctccttctttttctctcccccgtctctgtttctctgtgtgtgtgtctctgtctctctccatctctccctgctgtttctctgtgtctctgtctctctacctctgcacccccctccctcctccacacgtcctctgatgcacactccccttctcgttcccgagcagacagactcgcagcagcactgggatctgagcgccagatggagtttatttgcagagtggctggggcgagagaaggcaaaacacatcacagagagggtggtgccaggtgggagggagacccggccggagagaaggagagaggacggcgggaggacagggacggaggggaggctgcgccacaccagacaggctaatttatttaacagacatttcctgatccctgctgcaggccatcgctgagtacatggggtctgtcagcagacggaaggcggcaaagacccccgactccaggagctcacaaaataaccacaaaaaataagccatgcagttagaagaggatacacgtcctagagcaacagcagagtggggggatgaggaggcagacagtaagcatttacaacgcgcagctgtaatcccagcactgcgggaggccgaggtgggagactcgctccaggccaggaatttgagactagcctgagcaacacagcaagacccgcccccaaccatctttttaaaaagttaaaaattagcctagcgtggtggcgcatgcctgtagtcccagctactcaggaggctgaggcaggaggattgtttgaggccaggagttgacacccacctgggcaacatagcaagacccctccatctctaaaaaaagttaaaaattagcctagcgtggtggcgcatgcctgtagtcccagctactcaggaggctgaggcaggaagattgcttgagctgtggattttgagactgcagtgagcagagatagcaccactgcactccagcctgggagacagagcgagaccctgtctcaaaaaaaataaaaatgcgaggggtgaggggatgagcctaaagtgccctgagcaaacagcaagtgcagaggccctggggaaggtggcggcaggtaccgagagccacgcggaggtctgagaccctggggaaggtggcggcaggtatggagggacatgcagaggtctgaggccctcatggaccaagggaggaatgcagcctgcagagaggagagaggaggaggacgccgaggggaatcccaagccccatggatgaaaacacaccgaggagacaccaaaagccgttggccttgggggcctcgggtggggcggcttccctttctgcatcccccggggcctcctcactgcccagcctcctcttccaccgctcccactgcctccgcctcgccctcccgctgcctccaggggcgccccaggtgctccctgatggcgatcacagcgctcctccttcgggggtgagggtccagcagcccccgcagaagcgcgtcggccgcggcggccaggccgaaccagggctgagggcggtcccggggctggcccgacgcctgccagatgaggaagtcctcgtagaaggggtcggcctcggccaggggccggtcccaggggaagtagcccgtgaggaggcagaagagcaggacgcccagcgcccaggcgtccagggcgggctgaatgggcaggccctcggggagcggcgggggcgcgcagagctcgggggccgtgtaggggatgggcggcccggccaggcgcagcagcgtcccgcgaggcctcgtgtggccgaagtcggtcagcttgaagcgccggcaggccgggtcgcacaccaggacgttctccggcttcaggtcccggtacaccaggccgcgggcgtggatgtactccagggcggaggccagctgggcggcgcagcggtgcaccgcgggctgcgggaggcccacctgcggggagaggggtcagggcccagtgccccggggccacggaaggcaaccgagacccaggaagcaggcccaggacgccaaggaggccggtaaggaagacggtgaatagttggccctgtgaggcctagtgtgacctgtgaggcctgcgggtttagtgtggcctagggtgaccccgtgaggcctagtgtgacctgtgaggcctgtgggtttagtggggcctagtgtgacctgtgaggcctgtgggtttagtgtggcttagtgtgacccgtgaggcctgtgggtttagtgtggcctagtgtgacccgtgaggcctgtgggtttagtgtggcctagggtgaccccgtgaggcctagtgtgacctgtgaggcctgtgggtttagtggggcctagtgtgacctgtgaggcctgtgggtttagtgtggcttagtgtgacccgtgaggcctgtgggtttagtgtggcctagtgtgacctgtgaggcctgtgggtttagtggggtctggggtgaccctgtaggacctgtaggttaagcggggcctcgggtgaccctgtagggcctgtgacttgattggggtccagtgtgacctggggctgcctggtgagtctccatggtgtatcgtgtgagttctgtgatgtctatgaactccaaagaggcctaacaactccacgagtcctgtgggccccacgaggggcctccggggggtaggggaggcccagggaggcccaacgcagtggctgtggctcctgcggcccaggctgctcaggacgttcctgggaggccggtgaggcactcggaggcggcctggggtctgcctacgcaccttgggctggatgaaggccatgaggtccccgtgcaggacgggctccgtcaggaagctgtaggagtgtgccgactcgatgccaatgccgtaggccgtcacgatggctgagtgcgcgcccagcgagagccccacacagaactcgtacaggaagccacggagggacgtgcggggtttcgggagctgcttcagtgccaggggtgtgcctggggcagcagggacaggtatgggaggcgtgcagcagccaagggccacctgggccagctgctctgttcccctgtggtcccctcaatggcccctcagcttggactctttcccatagaccatctccacctcctccaactcccacctccctcctgagcccatcctaacagcatggccacccaagcatcaccagcggtaccaatagttatagcacgctggggaccagctgggggctcaggcctgcgatcccagcgctttcagagaccgaggtgggaggatccgttgaggccaggagtttgagaccagctcggacaacacagtgagaccctacctctaaaaaaagttttaaaaaggccgggcactgtggctcacgcctgtaatcccagtactttgggagaccgaggcgggtggattgcttgatgtcaggagttcaagaccagcctggtcaatatggtgaaacctcttctctactaaaaacataaaaatctagttgggtgtggtggcgcatgcgtgtaatcccagctacttggccggctgaggcaggagaattgcttgaacccaggaggcagaggttgcagtgagccgagattgcgccactgcactccagcctgggggacagagtgaaaaaaaaattaaaaaaataattagctgggcatggtggcatctgtaaaaaattaaataaaataataacagtacgtggtgaatttctaccttgctttcttacaagtctatagccatggagatggagggataccatgaaatttctccaatgacctcgtttggcttctcatgacagcaaactcgtgtttgaggcaaaaaggtatttttgagacacctggggaaaaggtaacccacactgggtaagaaagccaattaggaattgtggattttgtcacgtgtggaaacgacttcctagaagctaaactccccgaaggaacttctgatgtcttccttttttttttttttttttttttttgagatgcagtttcacgcttgttgtccagactggagtgcagtggcgtcatctcggctcactgcaacctctgcctcctgggttcaagcgattctcctgcctcagcctcccgagtagctgggattacgggcacctgccaccatacctagctaatttttgtatttttagtagagatggggtttcaccatgttggtcaggctagtcttgaactcctggcctcaggtgatgacccacctcagcctcctgaagcattgggattacaggtgtgagccactacacccgccctttttttttttttttttaagacagggtctttctctgtcgtccaggctggagtgcagcagcacaatcatggctcactgcaacctccgcctcccgggctcaagcgattctcctgcccaagctccctgagtagctgggactacagttgtgcaccgccactgggctaattgcacaccaagctgatttttttccctgacaccagaaattcctgctaactggctaagttttttaaaaaaaatttgtagagacggtctcgctatgttgcccaggctggtctcaaactcctaggctctaagcaatcctcctgccttggcctcccaaagtgctgggattacaggtgtgagccaccatgcccggcttggtttctttgatttctgagccatcagctgccagggtgcaaccttccccctcacaaggccgtgtgtaactgggataaattccctccttattggcccagcgcagtggctgatgcctataatcccagcactttgggaagccaaggtgggcggatcacttgaggtcaggagttcgagatcagcctggcaaacatggcgaaaccccatctctactaaaaaatacaaaaattagccggtgtggttgcacatgcctgtaatcccagctactcggaaggctgaggcaggagaattgcttgaacccaggaggcggaggttgtagtgagccaagattgtaccactccactcactgcagcctgggtgacagagcaagactccatcttcaaaaaagaaaaaaaaggaaaagaaaagaaaggccgagtgcagtggctcacacctgtaatcccagcactttgggaggcccaggtgggtggatcacttgaggtcaggagttcaagaccagcgtggccaaaatggtgaaatcccatctctagtaaaaatacaaaaatcagccaggtgtggtggtgcatgccttgcctgtagtcccagctattcgggaggctgaggcaggagaatggcgtgaacccgggaggcggagcttgcagtgagctgagattgcgccactgcagtccacagtccggcctgggcgacagagcgagactccgtctcaaaaaaaaaaaaaaaaaaaaaaaaaaaaaaaaaaaaaaagaaaaagttccttccttatcaaaaacaccagccatccccgcccactctgcagccagatgcagtggggtctcttctgcgtgttcacagcgctcctgatcactgccgccacggccacgccacccggtgttggcgatccctgcccatctatgctccccacggtgccctgagcttcttaacgacagtgacatgttcagggccccagcatcatgcagcccaggggcaggtgtgctggaggcctccagatacaggttcagtgaaatggccatggaggggcctcattggcaatgcccccgcctgttactgctcatgcctccggctttgtgagcacccagggctggatctctgcatccgtggctcttcctgaggtgtgctgttgtgtggctgtgttattgccctctgtgttattactgaattgtgtatccccaaaactcgtatgtgggagtcctaacccccccagtgctgaatgtggctgtatttggagatggggtctttaaagaggtaaaatgaggtcactagagtgggcaggccctcatccaatgtgactggtgtccttataagaagaggagatcaggacacagacacacacagagggacgaccatgtgaggacacagggagaagacggccaaatgcaagccaaggagagaggcctcaggagaaccaaccctgctgacatcttgatctcgggcttccagcctccaaagctgtgaggaaacagagctctgttgttggccaggcacggtggcgcacacctgtaatcccagcactttgggaggctgaggcaggaggaccacttgaggccagtttgagaccagcctgggcaacacagtgagaccccatcttaaaaaaaacatttaaaaattagccgggcatggtggcatgcgcctgtagtctcagctacttgcagagctgaggtgggaggatcccttgagcccaggaggtcaaagctgcagtgagctatgattgtgccactgcactccagcctggacaacagcgagaccctgtctcaaaaaaaaaaaaaaaagaaaaaaaaagaaaagaaaaaaggccaggcacagtggctcacacctgtaatcccagcattttgggaggctgaggcaggaggatcacttgaaataaggagttcaagactagcctggctaacatggtgaaaccccatctctactaaaaatacaaaaatgagctgggcatggtggcatgcacctgtaatcccagctactcggggggctgaggcacaagaatcacttgaacttggaaagcggaggttgcagtgagctgagattgtgctactgcactccagcctgggcaacagagcgagactccatttcaaaaaaaaaaaagaaagaaaaaagtcaaaagttctgttgtggaagcgcctgcctttgttatggcagccccagcagatgaatgcacactttttctgcattcatgctaggagatttttgaaggcagggactggctctggttcaattctgggtccactgcccgcccaacccccccagcacagggctggcctcagaaggcgtgccctgaactgactgacctcaggttgcctccctattttccgtttcatggaaggacacggtgcttggcagaaaggcccagggtagtggggagctgtcctgcgcacccactgtgtgccggccttgctaagtgcttagcagacagcatcactctgcatcatcccacggtgaccactacagccgccacaggaggctcctgagctgggagctctgtcttacccagcattatacaaccccagcaactagagcagtccacattcactcagaggatccaccattcttccaagtagaaatcatcacccacattttccaaaggaggaagctgagactcagagagggcaagggagttcctcaaaacacagtttttggcagggcaccgtggctcatgcctgtaatcccagcaattgggaggctgaggcaggcggatcactggaggccaggagtacgagaccaccctggccaacagagtgaaacctcatctctactaagaaagaaaaatacacacacacacaaatgtagctgggtgtggtagtgcatgcctatagtcctagctacatgggaggctgaggcaggaggaacacttgaacctgggaggtggaagttgcagtgagattgtgccactgcactccagcctgggcggcagagccagactgtctcaaaaacaaccaaccaaccaaaagaacaaaaaacaaaaaacacacagctttggagggcagaggtaagacttgattcaggcctgccagcctccccagcctgggctaccccaggcccgtgccccgcccccagctgaaccctgccacctctggccccacagcctcgtacctttctgacgatgggtgaccagaaggacgcggccatagcaaccctggcccaggggacgcacttcctcgtagagctcgtccacctcggctcggaccagggtctgagcactcagcgtcatcatgtcctccagcgcgcgggcagcctcctggccctgctggagctcctctaatgtcaggccgcccagaccctcctcctcgctgtcctccgaagcccctgcctccgccggcccttcctcagactgtttgccgggcatctctgcgagaacagagaggggtgcccaggctcaggtcccaggcccaagggaggaggggactgggggtctggactcctgggtctgagggaggaggggctgggggctcatcgcgcttctcattgtgactcagtctccctcttggtgagaggtggggagacaagtctggtgtgagttcaagccccaggtcacagatgtccctgcccgcgtgccgccgccgccacccgcccaccctgaggttgaaagatgaaccagataactgagactcccccatcttgtttccaaagcaaacagacttgggccctgggggtggatgagtagactctgtctcctgagaacaaacaggtgctcttgggctcagggctgggagggcgggctgtgcagagggcctgggacgcctgggtcctgcatgggaccgagcacttgggatcagtccccaagctcctgacaggcctggggtcccactttcacagcccacccacctccctccgacccagccccccagcccctcctccgccaggcccaggggtccaggcccccagcccacctctctcccggaacctcatacaattcacacaactggggaccccctgattctgtttccctcaccctccaccgctctacagcctccaggtgcagcccaggctcccctgagggaccgaggactcgggccacctggtacagtcaccctcaggtgctgcccacctcaggccagggcaccttgcccacctcccaacctgggctcagacctccagacctcacctcctccaaggccctcctgaccctccggccgccggctgtggtcagtgcccggcacttagggctcatgccagcagaggcctgcctaggagcaagaccccgccccgactttgggggtcgtaaggccccgcccctgggcccgccccttctgcccccactgggagcagagcgacatcgtgtgatgactcctggaactggctgtggtcaggtgaataccctgacccaagagttgagccctcctccttcagacccaggagtccaggccccagcccctcctcctccctcagactcaggagtccaggcccccagcgcctcctccctcagacccaggaatccagtctcccagtgcctcctccctcagacccaggagtccaggccccagcccctcctccctcagacccaggagtccaggcccccagctcttcttccctcagacccaggaatccaggcccccagctttccctccctcagacccaggaatccagtcccccagtgcctcctccctcagacccaggagtctagaccccagcccctcctccctcagacccaggagtctaggtctccagcccctcctccctcagacccaggaattcaggtctccagcccctcctccctcagacctaggagtccagacccccagcccctcctccctcagacccaggagtccaggccccagcccctcctccctcagacccaggagtccaggccccagtccctcctccctcagacccaggagtccaggcctcagcctcccccacccatctgaagttttccggcagaactgaggcctccccaccccctcaaggcctctcttcccagttgctccagcacctgcttcccgcccctctgagtctgaggtcatcccacactgcatcgttctggaatctcattgtctcattctttccccaaactagaccccagcatctgatcccctggacacccctctccaagcacttgtgtctgacctgtcaatggggcattgatggggcagctgggtggggtcaaggcaggggtgggttccagaaatgatttcattttctacacgggacccggactcctgggcctgatggaggagggggttgaggacctggactcctaggtctgagggaggagggggttgaggacccggactcctgggcctgagggtggagggggttgaggacctggactcctgggcctgagggaggagggggttgaggacctggactcctgggtctgagggaggagggcctgagggctcctgattccaaagagaggaataacaataaaaatagtttgaaagcgcataacaggaatacaggccagtgagtgcctccctgctgtaagcacagggagattaagccccactaggaagtccccaagccttgggccacagtgggacttcagacccctgtttttttctgggacggttgcacccacccttcagggttttttatttcttttttttttttttttttttgctttttgagacggaatctcgctctgtcacccagactggagtgcagtgacgtgatctcggctcactgcaacctccaactctctggttcgagtgattctcttgcctcagcctcccgagtagctggaattacgggcatttgccaccacgcctggctaatttttgtatgttttagtagagacagggtttcaccatgttggccaggatggtcttgatctcctgacctggtgatccacccgcctcagcctcccaaagtgctgggattacagaggtgagccactgtgcctgggctatttttatttttttgagacagggtcttgctctgttgcccaggctgagtgcagtggcccaatctcagctcactgcaatctccacctcccaggttcaagcgattctcatgccttggcctccagagtagctgggactacaggtgcctgccaccactcctggataattcttatatttttagtagagacagggttttaccatgttggtcaggctggcctcgaactcctgacctcaggtgatccacccgcctcagcctcccaaagtgctgggattacagccataagccaccgtgtctggcccacccttcaggtttatactgccatgactgatgtgaagtcacttcatttttttaaataaactttttattttggaatcattttaggtttataaaatggttgccaagatcctgcggagagttcccatgcaccctcccccagcctcccctggtgtcggcatcgcgatgcaaaccgtgagacatttgtcaaaactacgaggctcacagttgggccaacaccagactgttatttcagcagcgcttccacgatggatcgagcccaggatgccgtgtcgtatgtagtgagctcacttcccagcctggaagcataccttcctgcttaggaaacacagtttccagttctggaccctccgctgggtgctggggtcttggatttggatctagttcatccccgtcctgcaggcgtgaacctccacaagccaggctccgtgtcctgtctggcaggtgccatgggactgcggggcgcgggctggccttggtgaggaaggagacccatgggtaccaggcctggctcttaggattgacgggtctgagaaagggggacggagctgggacaatcacaatccgtggtgctctgtgggagcagaactgggaaggatctaaatatggagaagaccaggtccagcctggacagtcagaaagagacatggattgttctaatacaagttccccaggaggccagagagggctgggggtgggggccactttctggagccatgggtcagggggaagatgctctcggtggaggccacacagtgcgccaatgtctggcagcagctgtgcgtgcatgcgtgtgcatgcgtgtgtgcacacatgtgtgcatgcgtgcgagtgcgtgtgtgtccatgtatgcacacatgtgtgtgtgcgcgcgtgtgtgtgcatgcatgtgcgcatatacgcgtgtgtgtatgcgtgagtgcatgcacatgtatgtgcgtgtgtgtgcacacgtatgcacccatgtgtgtgtgcgcgtgcgtgtgtgtgttctcacatgtgtagatttaggtccagaacagatgagtggcgcccatgacatcacccacagcccagagaaatgggagaggtggagggtgaggtttatatggtgtcggatcctaaagttcagatcttgtgacatggacagcgggagccacggaaggtcttagaggagaggagtgatcccatcagaactccatgatggccaggcgtggtggctcatgcctgtcatcccagcactttgggaggccaagacgggtggatcatttgaggtcaggagttcgagaccagcctggccaacatggtgaaaccccacctctactaaaaatacaaaattagccgggtgtggtggtgcgggtgtaatcccagctacttgggaggttgaagcaggagaatcacttgaacctgggagggggaggttgcagtgagctgagatcgcgccactgcactccagcctgggtcacagaccgagattctgtctaaaaaaaataaaaataaaaaagaagacactctggacggagggaagaggaaaggtccttgagggaggaagggatgggagcctggatcctgcgtctgagagaggaggggcaggagctgggctcttgggtcctcagttggaagaggaatgcgcgtccaagcccagcgttccgtagggagagtgcaatgtgttccctctctgtcctcccgggtgcagctgtctctccatccaggtggccctgggggctgggggaagggcctctggcccaggctctggccacctgtctctgtcacctggtcagggagctcccccatctgtccccgtcctcccaccacttttgctgtcatcaccctcatctgtccactcctccaggcttgagcctccctcctccctgtcctcataggacacggcgctccccaaaaccccaggtccctctctgttcccttgcaacccccagtcgtcccccaggaagtccaggacagccagtggggggctcctagtctcgggatccaggtccagaagcccctggagcaaggccagggctgggggcgcaaactggtcccagggtggtggtggctgaggtggctgaggcttggtggtcacccagccagcgaaggcctcgaactcagggttgggggccagtgccacgtcccaagggaaacaggcagtggcagcacagaagagaagcacccccaggccccaggagtccacggctggccgcagaggcagggtgtcgggcggtagcaggagacagagctcaggcggtgccgtgggcagaggcactggtggggcgggggtcgggctgccctctggccgggtcagacccaggtctcccagggccacacggctgcagaccgggtcgaagaccagcacgttgtcaggtttgacatctgcgtggaccagcccccggctgtggaggaagtccagagctcctgccaactgggccaccacccgcttcaccagcagttctgggaggccctgaggtcaagaagacaggaggagggtcagagtgtcttggttttgtcttttttatgttgtccaggctggtctcaaactcctggcctcaagcgatcctcctgccttggcctcccaaagtgctgggattataggcatgaggcactgcaccagttggttccttctgaataatttttgaaagaggctctagattcctaagtcctaaaagtttgactcttggggtttgagaatctagaaccccagactagtggctacctccagtgttcccaccacatgctcccaaagactttctctccatcatcctcaacctcaacctgcagccatatctgcactcctgtagaccaactcccagctggtctcccagttttccccactggaaccccagttataaccagtagctccttcttttagcttctttcaaagattctcctaactcaaacactcaggcccactgtgaacatttcttatatatcttttgtaaactgaccatccagatcttctccagtgagaactcaaatttcattcttaaccctaatcttagtcttgtatgagtctagaccccatctctaactcagaggcttttctaaaattccccagtttatttcatcaattgattatctatccgtctagccagccagctggccaggcagcaattcatccatgaagccatccatccttccaacagtattgaacagtgtgtccatccaacatccattccaccaaccagtcagcaatccaataagttattctgttatttaatatccaacatccatatattcatcctcccttgcttcctttcacccatccactcaccatccattaatcatccatccaccaatccttccgtccacccacccatccatccatccactcaaccaatccttccatccacccacccacccatccactcatccatccaccactcactcacccaccaaacctttcatccatccatccatccatccatccatccacccaccaatccttccttccatccatccacccatccgcccaccaatcctttcatccatccatccatccatccaccaatccttccttccgtccatccatccatccgcccaccaatcctttcatccatccgtccatgcagccatccacccacccatccatccaccaattcttccatccacccacccacctatccactcaaccaatcctttcatccacccacccacctacccatccactcatccatccattcactcacccacaaaacctttcatccatccatccacccatccatccacccaccaatccttccttctatcgatccatccatccatccatccatccgtccatccacccaccaatccttccttccatccatccatccacccaccaatcctttcatccatccatccacccctccatctacccacccacccatccatccacccacccatccatccatccatccacccatccatccatccacccacggatccttccatccacccacccacccgtccactcaaccaatcctttcatccacccacccacccacccatccactcatccatccatccactcacccaccaaacctttcatccatccatccactcacctaccaaacctttcatccatccatccatccacccaccaatcctttcatccacccatccacccacccatccatccacccacccacccatccatccatccaccatccatccatccacccacccatccatccacccatggatccttccatccacccacccactcatccatccatccatccactcacccaccaatcctttcatccatccatccatccatccatccatccacccacccacccacccatccatccacccacccatccatctaccagtccttccttccacccatctattcacccacccatctgtccactcacccatccttccatccttctaattctcaatgagactcatttctccacatgtaccttcctcatccccttccttcttttattccttccatttatccctaactttatctcaaatccaaaatctattcctgaaactatccctacccctaatctccaaactcgagagaccctagaatatcatgggttctgtcctgacctggtctcctttctagaagaaaccccattatagcccatctccaactcagtctatatacacatcctcaaccgtctctgcttctctctgcagcccattcatgcttttctccatactcacgatgaatctataatcaactctaaactcaacccacccaactccacccatgcccacaccctaacctcagagtcaactaaaatcccaaccctgtctccctccccacccccttcattgactccagtccatcctcaatcccacccccagctccctgcctttccacgattgtgtttgggtgattggatggattagggttgaggtcaggcatggaacctcgttgagaattagaaagggggaggtcatgtgggggctcagggtggagatggattgggcgggccctgatttggggtcagagttggagacagagacggggcttgggacagagttggacctgggataagcactcccaacctttgtccctcgtggcctcaccctttcctgcagcatcccgctgaggtccccacagggcgcgtactcctgggcgaaggcaaaatagcggggggtctgtaggggtcctgccagggtctgcagcaggcctgggtgtgcagagacgcagcggcccacacagaactccctcaggaaggtgcttctcaggaccaaatcccgacgcaggagcttcagagccacagctggacctgccagggagatgggtcggagggacactcaggcggctccagtcctgctgtggggcctgagggaagccgtgtaaactctctgagcctcacacttctcatgggcagcacgggctcccctgtctgtgaagtgtgggtgggaggagaccttctttgaagaccctccctgctctgcctcggactgcggcgtgggcttgcacagccgcctcaccctctccgggcctcagtttcccctggcatcaagtaagagacacggtggtgacttgggttccaacttgagttgcatacctgtcctgctgtgggaccgtaggcagtccctcgccctctctggggtggggcctgtgtttctcagaagatcccagagctcttaactttcagagtacccccactgagaagggtccccatcagctcctcctgggaatgccccctgtctgggtggcttccgagaatgcttattgtggggcagttggggaggctgcccttgggtggctgaactcacccccctggtgaggctgggcaaggagcacgcggccgtaggagccggagcccagcttccggatgaggtggtactggtcccgaaggctcctcaccggggtcaccctgctggtcgtcagctccaccagccgttggagggctgtggctgtgtcctcctacgggagaggggcagggtgaggagggggcgcgtctggggtccactgagagtggtgggggaggaggtcacggcgcagccccaggatggagggtggggcaggggacaggggtcactgtccccagagaggaggatgagtcacagtgactcacccggactcgggccacctgtttttgtgtcctggagaggttaggggtcactgccacagaggccccgcctgcccctgtctgtgggagcaggccaggagcccccagccccgagtgggggtgcatcctcagcccacacagtccccctgcccaccctggtctctctctccaccgtcctcttcccctgtgcatcccgctgtgtgtttctgagtccaattctctgggggccttggtctcgctgtgtgtccttggatctctgtcatcctctctccctgggtctgggtctctgaggtctttgcgtttccctgttttctgtttctcttcctctctctccccgtgttgcctcctgcctctctctccttcttttctctctctgtcttcctcccctggctcccgtctctcacctctgggtccccatcctcaggggtctcggaggccctgcgctccatctcagggcttcctgatgtggggtggcccttgggcgggacccccccgtcagggctccccagaaagcaaccagccccctgcaccccacaggttctcgctgcgcagagccaagggatggaagctcgtctgcaaggtcagcctcagtcgccccttgtctgtccggctctgtctagctggaggagtgtctctgcctctctgtgccctcctgccaccctctgggtgtattccctgctgtgcttcccaggtgatagcccttactccccacaccctctcttcccctctctttagccaaccccagtctctccttccttctacaggaacacctttctgtcagcctctctcttgctccgtctatcctctctctttgtgcgtctttgtctccttctctccccgtctctctctctccaccctccctgtctctgtctcgcacttgggtctctggggtgggactccccctccctgtcccgtctctgtgggtcgccggcccctctcccctgtccgcacactgtctccactctttctccaccaactctgggggtgtctccacgctctgctccctgcctgctcccctctctctgtctgtctgtttcccgtctctcccggcccctctgggcatctccgtccgctctccccagtgtctctgcgtctctctcctcctctttgttcctgactctctctcaaagcctttgtccctccctttctctgggcctgggacaggggtgtgtgtgacagctcagagacagagacatcctgtccccccacacccctccctcaccccctctgaccgctgccccctccctctcccttccaaacttagaccagcttggactctgggctccagtcccaggacagacgggacaaaacatattgtgaacccccaacaaggcccaggcctgagggcagaggaaagggtgggacagacccctccacacacctgagctgggatgactggcccagagctgagcacctctgtcttgccccagaggccaggagcgctggtgtccagggaccagggaacagttcccaaagccctcctccttcacaccaggagtgctggccccagctcctcctccctcacacccaggagtccaggtccccagttcctccatcctcagacccaggagtctaggccccaagccccacctccctcagacccaagagtccaggcctccagctcctcctccctcagatccaggagtctaggcccccagcccctcctccctcagacccaggagtccaggaccccagcccttcctccctcagacccaggagtccaggcctccagcccctcctccctcacacccaggagtccaggtccccagttcctccatcctcagacccaggagtccaggccccagcccctcctccctcagacccaggagtccaggtctccagcacctcctccctcacacccaggagtccaggtccccagtttctccaccctcagacccaggagtccagactccagctcctcctccctcagacccaggagtccaggccccagcccctcctccctcagacccaggagtccaggctcccagccccttctccctcagacccaggagtacagactcccagcctctccttcctcagacccaggtccccagcccctcctccctcagacccaggagtccaggcccagcccctcctcctgcaggactcaggagctgaagtagctgtgggaagcgccagggacagaggtgctctcatgttctcagcacctgttccgcgcctagccctgtgcggggctttacactggatcctcccagctgcccaaagggtcagtatttatccccagtttacggagcaggaaactgaggttccgagaaacgatcgtgttacacaaggtcagaaggggagcgggccccgggccaggcctgtgtgactcagaggcctgctgcctgccccactcgtgtttccactactactacagccctgctattaataaagacacagcaacggcagcgacgcgtaggcgctggaaggatctgcaggaaacaggctgtggcgctggcctctggggagctggaagggacccaaggaggggcagaggtagaacttcctttgctgttcggaggttagattggggaaagtcgcaaacctacagaaaagtagaaaaagtgctgtccgtgcctgtagtcccagctactgggcaggctgaggcaggagaatcgcttgaacccagggaggcggaggttgtggtgagccgagatcgcaccactgcactccagcctgggcaacagagcgggactccgtctcaaaaacaaacaacaaacaaacaaacaaataataacaacaaaacaaaaacaaacaaacaaaaaagtgctgtcatgaacacccattggctaaacttcacagatgtggccacttggccatactttcttgatctttatttctttgtcggcgggggcatacaaactagtttcaagtaaatgataaatattgaagtcttttggaagtggaaatgctgagctgcctggt[131 bp omitted]accccgtctctactaaaaatacaaaattagctgggcatggtggtgtatgcttgtaatcccagctacttgggaggttgaggcaggagaatcacttgaacccgggaggcggaggttgcggtgagccaagatggcacgattgcactccagcctgggtaacaagagcaaaactctatctcaaaaacaaacaaacaaaaaagtctggcaaaagaaaagaaaatgtgtgtgtgtgtgtgtgtgtgtgtgtgtgtatgggggggtggtgggtgggtggtgagacaagtgagagggaagggactcattttattcctctgtttctggttatgctggaaattttccttcatgaaaagctacaagttataaactaaactacaggcattgtgatgaattgtgcccaaacatttgagagtacctatctgtaaaagtaaggaaaatttctagctcagctacagtaaaattgtcataatgacttttttaacaaaattgaagatgaggccaggtgtgatggctcacgcttgtaatcccagcactttgggaggctgaggcgggcaaattgcctgaggtcgggagttcgagaccagcctggccaacatggtgaaaccccatctctactacagatacaaaaattacccagtcgtggtggcgtgtgtctgtaatcccagctactcaagaggctgaggcagaagaatcgcttgaacccgggaggcagaggttgcagggagccgagatggcgccactgcaccccagcctgggcgacagagcgagagtctgtctcaaaaaaataaaattaaattaaataaaaaataaaaaatttaagatagggtcttgctgtgttgcccaggctggtctcaaactcctaggctcaagtgatcttcctacctcggtctaccaaagtgctgagaatacaggtgtgagccacagtatccagcccaacaatttctcgaaatcagataataacaagtctgtcttcagtttctcacatttatttttttttaaatgccttggctgggcgcggtggctcatgcctataatcccagcactttgggaggccgaggcaggtggatcacctgaggtcaagaattcgagaccggcctgaccaacaaggtgaaacccccctctctactaaaaatacaaaaattagctgggtatggtggcaggtgcctgtaatcccagctactcgggaggctgaggcaggagaattgcttgaacctgggaggtagag[137 bp omitted]atcccgtatgactttcagggaactttttaccactgtgccttttacattatttgaatttttcctgtgagtatgtgttattcaaaaaattttaatgaaataatacagtgatgatgatacagtaatatagtaacactcggtgcttacttggtgccaggccctggtcacgctctctcggtctctctctctttttcacttaagactttgtggagtcctcccaacaagccctgggtcggtagaatgatggtttccaatttcctgatggggacagtgaggcatgaagcagcagagtcatgggccacagagccgcagccagggagaggcagagctgggatgccttgagatctggtgactccaggctcctctgtgccccctgcccacgcagctcccgtgaggccgacctcaggtgcccggcccggctcgagctgagctcctccactggagacccggggctggctgtgcgccgacaggcaagcgcatctgctaccctagagccggccacctgggtcccccgggaggagagtgagaggggacgctgcgggcctccagccctcccccagacgctcgctggtgatccgaagagctttgcacctccccatttagtaacgccgctctgcggggtcacccggagtgacctcggcacgcaggtgtggtgggggaggttgcagtcctgcagccccagggtacacacacacccctcattaaagctgggcggtgtgcctctctcctcccctccgtcctgcccaccagcctccgaggcctccttttgtgaccgtttcctggctttgtcccctcctggccgaacgagggcacacaagttaagtgtgttaacaacaacagcaataataatagtgtccaacactcatactgtactcggtgctgtggcttgtgttttcatctattattgtcattgttgcgaagagtttttgcagggatggggtctcactatgcggcctctaccctctcactatgttggaattcgaggctggtcttgaattcccgggatgcctctgcgcttcagttttctcctgtctgaaatgcaggtcatccccagctcctacccacagcgctgttgataagaaaattgatatgtataatgcatatactaatgtacattataatattatatctaagataattattttagatatgatatatactatcctatattatatattaagtgatatatgtagtatatatcttttgtataatatatatacttatatgttatttttaaagtaaattcaattaagaaaatatatactgaaagaacatataaaaattaatttacacttcaaagattgttcagttgacaatgtaacccacccaccatcacactccatccttgggccaaaaaaggtgaaaagaaaaacagaaggaaaaaagtgttaacattaaactgatttgctttatctggaacgagttagattataaactagtagaccaaaatctcagcctttaatagtcatcctgatgagttaaccaaccttcgcaggaaaggtggaaatgttttcactcctgatttttatttttttattgttgtttgtttgtttgtttgttttagacggattctcactttgtcacccaggctggagtgcagtggcccgatctcggctcactgcaacctccacctcccgggttcaagtaattctcctgcctcagcttcctgagtaaagtgctgattacaggtgtgaaccaccgcacccagcccactcctgttttttttttattttgtttttaagacagggtctcactctgacatgcaggctggagtgcaatgacacagtcacggctcactgcagccttgacttcctgggttcaagagatcctcccacctcagccttccaagtagctgggatcacaggtgcatgccactgggctgactaccttttaagttttttgtagagatgggatctcactatgttgcccaggttggtctcaaacttctcgcctcaagctatcctcttggcctcggcctcccaacgtgctgggtgggattacaggtgtgagccatctagccctttgctcctgttttaagacagtaatgctattttctttctattgcaccatgtatacgttgaacaaatattgttaaataaaagaatggatgaaaacacaagccataccaccaagcatagtgaatgcttaacaattattattattgttgttgacaaatgcgcttacagcagttactatgggccaggtactgttctggggctttgtatacccttgcagtaatctcattaaatccttatgttctacctatgacataggaactattatttcccgaggcacagacaggccacacgtgctaagtcttatcgccgtctctgacctgctcacacgcagcacaaaaccttgctgggattctctgtgacatgaaatatttcacgcatatcccccaaatataatgagtattcatg[135 bp omitted]aaccctgtctctactaaaaatacaaaaaattagctgggtgtggtggcgagcacctgtggtcccagctactcaggaggctgaggcaggagaaccgcttgaacctgggaggcggaagttgcggtgagccgagatggcgccagggctctccagcctgggtggcagagggagactctgtctcaaaaaaaaaaaaagaattctcactgcaaaaaaaaaaaaagaaaaaaagcatgtgaggtaatgcatatgttaattatacagcttgatgtagctattttccaatctgtgtgtgtatgtgtatatctatataaacatcatgtgagccagacatggtgggacacgtctagtctaggaggctgtcatgtcatgtctgtctaggaggctgaggcatttctcgaggccaggaattcaagagctggagatgcactggtgaaaaacacgcatggcactccagcctgggcaacgtggcgggaccctgtctttaaaaacaatagaaaaatcatgttgtacacaacaattgtatacattctttatttgtcaaggtggaacaaaaaaaaaataataagagcggaaagaacaacaacaataacaaaagagtgcttttgcaggtgcgcccagagctgtgaaaaacgtgagttgccaatgcacacatccccagctgaggctgaagaaagcgatgctccgccttttcgtgtcagccgctcctacaaacaagcgtctcttttttttatgttggtgctgcgattttcacatttttgtggtttttgttggtgattctgcaggtttgtgctttttgttggtgattctacacttcagctcccacgcacagcgctgaacagggtccccttcagtgcttaggaatgttctgcagtgcctcacatagaaaatctggcctggcacgggggctcatgcttgtaatcccagcactttgggaggccgaggcaggcagagcacttgaggtcaggcatttgagaccagcctggccaacatgatgaaaccccatctctactaaaaatacaaaaattagctgggcatggtggtgcacgactgtaatcccagctactcgggaggctgaggcagga[134 bp omitted]gagagagagagggaaagaaagaaaaagaaagaaagaaagagtccatgtgtgtcagatgaacttcattcaggtatgagctgtactcctgctggcggtgagttcaatgacaatgaatcaacaacgtgtctgtaaaagatgtctttaaacagaaaggcaaagtcagtgaggtattgattgtttgatgaagatgttgtaaccagcggcctgcaggaatctaaccctgtatttcccccagtggcaatggcttggtatttgccagtttggtgttctcagcaacttcaaggaagatagccaccatgaataaggagaatcgagtgtgtcgagtgaaatgaaacatatcatcaggactattttcaccttgtttgcatttacttttgtaaaaatagaaacacacagtttggcagacaacatcggggattacagatgccaccgaatcagctatggatctctctagaagtctgcaggtcacaggatgagagttattacattctccatcccctgaagctgttccccagacctcaccctctcctgtgtggatcaccatcccagcttatcagcttcttcctggcctcccctctcgcctctggactgccccgtctgacacacaaaggttctccctccttccctcccacccctccctcctccttccctcctttctttctctttctcttttcttttccttttctttcttttctttctttctctttctctttctttcttttccttccttcttccctttcttcctttctgtctttcttctttctttctctctctctttctcctttcctgtcctccttccttccctccctccctcccttccttccgtctttccgtccctcccttccctttcttttttgaggcagggtctcactccatcacccaggttggaatgcagtggtgcaatcacagctctctgcagccttgacctcccatacttaagtgatcctcttgcctcagcctcccaagtaactgggactacaggtgtgcaccatcctccccagctaattttagaattttctatagatacaggctctcactatgttgcccaggctagtttcaaattcctggattcaagtgatcctcctgcctcagcttccaaaaattctggtattacaggcatgagccaccacaccggccatcattctaacactcacttctggcccaggccctctcttcctcagtagcctcccatggctccctattgctcttgggatagagttcacactcccccgcctggcctccgagcccttctggagctgcacctgttgcaacttatttccacccggctcatctcacccaacacccaggcaatggaagaactcggaatgtccgagcacactggactctctctctgtttctcaggaaacgtgtgtggaatgaggagacggatggatggccgaacatggcaggtttgtaatggcttcagaaaccccatgtgattaataattatagccagcatttactgaacatattaccagccccagtgctaatcctcccagcaccctggggaggtggccctgttattagctcggcttcatcattgaggaaagtgagactcacaaagactaagcctcctgcccggtgtctcactatagatcagcagcaggagggactcaaacgccaatcaacccggcagtgcacaccctcggcctctctgctattcgtagatgtttgtgggccaggagccaggggcaggtgtaggccaaggttgctgacttctcttctttccattcaaacacaacacacatttcctggggactttgtatgcagagccctgagctgaggctgggtgctgggagaccacagacagactctgtccctgctccggaggtgcccagaaggttctgtgaaccaggatacagccgccaagaagcaaggtgtgcctcttccaaaggcgaccaagaggggcctagaagtggctctgagccaacctgacaggaaagttggcaggtgaggaaggggttcagagacctggcggataagtaaattaacagtagcaagagaggccaggccagtggtgactgggattcaaattaaaacaagatcgattaaataatgattgagggccaggtgtggtggctcatgcctgtcatcccagcactttgggaggctgaggcgggtggatcacctgaggtcaggagttctagatcagtctggccaatatggcgaaaacctgtctctactaaagatacaaaaactatccgggcgtgctggtacgcacctgaagtcccagctactcgggaggctgaggcaggagaatcgcttgaaaccaggaggcagaggttgcagtgagccgagatcgtgccactgcactccagcatgggcaacagagcgagccgccgtctcaaaataaataaattaatttaatttaattaacaataataaataacaatggatacctacctgctaccacgccggactcaagcgttgctgcagcatctgggacacacctcaaagcgaagccgactccagccctcgggaggatctgcagagacaggaagcagatctgcgcctgcctaggacatggggggcaggaggcaagtactggggggctatggctaaggggtgcaatgtttcttttgggggtgatgaaaaacgttttaaaattgtgttaggccgggcgcagtggctcacgcctgtaatcccagagctttggcgggtcgaagtgggcggatcacaaggtcaggagttcgagaccagcctgtccaacacggtaaaaccccgtctctactaaaactacataaaattagctgggtgtggtggtgggcgcctgtaatcccagctacttgggaagctgaggcaggagaatcgcttgaacccgggaggcggaggttgcagtgagccgagactgtgccacagcattccagcctgggcaacagagcgagactccatctcaaaaaaaaaaaaaaaacaaaaagaaaacaaaaattagccaggcgtggccgtgcacacctgtaatcccagctactcaggaggctgaggcgggaaaaacgcttgaacctgggaagcggaggttgcagtgtgccaagatcacaccagtgaactccagccggggcaacatagtaagaccctgtccaaaaaaaaaagattgtgttgatgtttgcacaaactctaggactataccagaaaccattgatttgtctactttacacggtgaattttatggcatatgaattacatctcaataatgccagtaaaaaaaatttggcctatagccaggcatggtggccagtgcctgtaatcccagatactcgagagactgaggcaggagaatcacttgagaccaggagttggaggctgcagtgagcccagactgtgccactgcactccagcctgggcaacacagagaaactctgtctcaaaaaaaaaaaaaaaaaaattggaacctgcattttagtgagtgagggaccagagcaaacacagcctgtgagatgcccagatcattttaaattttatttatctttttgaagcaggatctcactctgtcacccaggctggagtgcggtggcatgatcagagctcactgcagccctgacctcccaggcttaagtgatcttcctacctcagcctcctgagtagctgggactacacatacatgccaccatgctcggctgattttttttttggtaaagacaggcgaactctcactgtgttgcccaggctggtcttgacctcctgtgctcaagcgatcctcctgccttggcctcgcaaagtgtgctgggattacaggtgtgagctaccacatcaggcctatttttaacttttaacaccccctcctgtatagaagaactattttcaataaccatcatgtaataatcacctgcatctttttcttgactgctgggggggtttcttcctttttttttttttaattaatagactttattttttagagcagttttaggttcacagcaatattgagcagaaggtacaaagatcttttttttgagacagagtctcgctctgtcacccagtctggagtgcaatggcgcgatctcggctcactgcagcctccatctccccggttcaagtgattcttgtgcctcagcctcccgagtagctgggattagaggcatgtgccaccatgcctggctaatttttgtatttttagtagagacggggttttgtcatgttggccaggctagtctcgacctcctgacctcaggtgatctgcctacctcagcctcccaatgtgctggaattacacgcatgagccaccgtgcccggccagaaggtacaaagttcttctatactccctgccctgcccccactgcctcccccactatcaacatccccaccagggtggtgcatgggacacaccatcatcacccacagtccacagtgtacatgagggctcgctcccggttcatgacgttgtatgttctgtggctttagacgaatgtataatgacatgtccccaccactatagtatcagacagagtatcatagtttcactgccctaaatatcccctgggctgcacctcctcacccctctctccctcctagctcctggcaaccaccgatctttttcctgtctctgtagtttcctcttttccagaacctcgtattgttggaatcaaacagtaagcagccttttcagattagcttctttcacttagaaacatgcgtttaagttctcgccatgtctttttatggcttggtagctcttttttttttctttcagtaaaacctttcattgtcatctcatttctttttattgcttaataatattccattgtatggatggaccacggcttatccattcacatattgaaggacatcttggttgctttctttctttttttttctttttgagacggagtctcactctgtcgcccagactgaagtgcagtggtgcgatctcagctcactgcaacctccacctcccagattcaagcgattctcctgcctcccgagtagctgggattacagccatgcaccgctatgcccggctgatttttgtatttttagtagagatggagtttcaccag[137 bp omitted]gtagacattcacatgtgggtttttgtgtggacataggttttcaactcatttgagtaaataccaataagagtgattgctgaattctggtttatttatttatgtatttttttttgacatggagtcttgctctgtcacccaggctggagtgcagtggcgcggtctcaggtcactgcagcctctgcctcctggattcaagcaattctcctgcctcagcctctagagtagctgggattgcagcacatgccaccacacccggctaacttctgtatttttagtagaggcggttttgccat[243 bp omitted]tctactaaaaatagaaaaaattagccaggcgtggtggcgcatgcctgtaatcccagctactagggaggctgaggcaggagaatcgcttgagcccaggaggcagaggttgtggtgagctgaggtcgcaccattgcactgcagcctgggcgacaagagtaagactccatctcaaaaataataatatatatatataatttttgtatattatatataatttttgtatattatatatatgtatagtgtttttgagggagacatatttaatcattgaccttgtttacaattgctgcacttggtgacactgaaaagcagaccaagctgggcacagcggctcacacctgtaatcccagcactttgggaggctaagacaagaggatcacttgagcccaggagttcgagaccagcctgggcaatatagtgagtacccatctctatgaaaaaaaacatcgtaataaaatttagaaattagaaagaaaagcagaccaaacttttggttggtcattttattgttttcacctcctctatagccaaaacctcccttattgcctgcgtctggagcaggccagttctgctacctgtccaccacctggtaagcccctatagggagaccccattcacacccatcagagaggaagaaattgggaagtggttgaggacatggggaagcagggagctggaggcattgctggtcaagggaggggggtagactggtgggggagatggaggctgtagcggggaaatgggtctgaggcgtcctcttctgggtgtacacccctgagagatcttcccacatgtcctttgccacatcatgtgtgtgatgggaacggaaggcagtcgggaagcgccagacagcttctgtttgtctatctaagtctcctctctgttggggtgacaccctctgcctggaaggcatgcagccaactggactccacctggcttctctttgggttcagtcaacgggagacttcagcagatgatgcgaaggtgtgaggacaggtgctatgctgtccagctctctctccactgggctgcagtgtggcggggcgagggctaatgatggccatgctatgagtcagctggtgccatccacgccactctctgcaactgaaatttgaaaattataagtaattctaagaaaacaaagatatatcatcacattgagtgatgatggagactagacacgtggagaaattgcaaaggatatgcctttgacaaatgtcagcctttatttatttatttatttatttgagacagggtcttgctctgttgctcaggcaggagtacagtggtgcaattagagctcactgcagcttcgacctcgggtgttcaagtaatcctcccacctcagcctcccgtgtagctgggactacaggtgcattccaccaacaaccacacctacctaccttccttccttccttccttccttcctctctctctctctctctttctttctttctttctttctctttcttgttttagagatggcgtctcactatgttgctcaggctggtctcaaacttctggcctcaagcaatcctcctgccttttccttgcaaaatgctggtattacaggcatgagccaccacacctgactgccagttattattatttaacagtgaaacaacaatagtggggtggctaaaaggataaactctagagccaggctatctggctttaccccccatccctgccacttactggccttgggcaaacatctctgcctctctgtgcctccatttcctcatctgtaaaatggggataataacagtatatatcacctaggcttgttatagaaattaaatgggttaatacatgtggattagcttctactgctgaagttaccttcaaaacgtagctgctcaaaactacacccatttctcatcatttctctgggttaggaggctggacccagctcagccaggtcctctgtttcagggactctcataagcctgccatcaaggcatcagctaggctgaggtctcatctgaaggctcaactggaaagatctgcttccggactcactcctgtcttggctagagttggtttctcacaggctattggactgggggtctctgttcctcacaggctgttggatagagatcactctcagttccttaccccgtgggctgctctatagggcaattcccagcatggcagctggccccatcaaagccaggaagccaagccaaaaagagaaagtgggggtgatggtgggaagagaaagagaaacaagacaggaatcatagtcttttgtaacctaatcttgagagtgacatcccatcactgttcccctattctattaaaaatcactatgtccagctcaaattcagaggaaggggattactcaaaagtgtgagcactgggaggcagggaccactgggggccttttcagaagctgcccactgctacatataaaagacttagggccaggtatggtggctcatgcctgcaatcccagaactttgggaggccaaggttggaggactgcttgaatccaggagttcaagactagcctgagcaacatagtgagacattgtctctactaaaaaaattttaaaattagctgggtatggtggtgcatgcctgtagtcccagttacttggaaggctaaggtgggaggattgcttgagcccagaagtttgaggctgtagtgagctgtgatctgtgattgcatcactgcactccagcctggacaacagagtgagattctgtctctggaaaaaaaaaatttatatatatatatatatatatatttctatatatatttttttatatatttctatatatatatttctatatatatatatatatatatatatatatatatatatatatgttgaagtcctaaccctcagtaccacagaatgtggccttatttggaaatcgggtcgttttgatgaaattagttaagatgaggctgtactggagaggaggagtcctactccaatatgactgctattcatatacacaagggagatttggacacagattcccacatagggaggatgcctgtgccgatgaaggccgaggctgaggtgatgcagccacaggccaagggatgccaagggtggctggtgacaccctgggcaacaaagtgagaccccgtctctacaaaacatgaaaacattagccgggcatggtggtatctgcccgtagtctcagctactcaggaggctgaagtgggaggatcacttgagcccaggaggttgaggtcgcagtgagccaagatcgcagtgctgcactccaacctgggtgacagagctagaccctgtctcaaacaaacaaacaaacagattgctggcaaccactggaagctagggagaggcaaggaagcactcccacagcaaggctgttcaacctgcagcctgcaggccacatgtggcccaggacaattttgaacgtggcccaacacaaattggtaaactttcttaaaacattatgagatttttctttttgcatttttgcatttatttatttattagttcatccataattgttggtgttagtgtatttcatgtgtggcccaagacaattcttccaatgtggcccaaggaagccgcaatcttggacacccctcccatacaggcttcagacggagtatggtcttgctgacctcttgatctcagacttccagagccctgggacagcacccttctgtgggtttttttttgttgtcgttgttgttgtttttgtacaaagtttcactcttgttgtccaggctggagtacaatggcacgatcttggctcactgtaacctccgcctcctggggtcaagtgattctcctgcctgagcctcccgagtagctgggactacaggcgcccgccaccacgc[176 bp omitted]atcttatttattattattattattttagagatggcagggtctcactttgttgcctaggctggtctcaaactctaggctcaagcgatcctcttgtctcagcctcccaaagcgctgggattccaggcctgagccaccgctccccgcctgaacttggaacattaattctacctggggtaaatctgcacctagagcagcgtctgactgaagggctgggagcggggatgtgagcacccggggaacaggggtcttgaggaccctcttagaattgtgcccacagcagggactgatagagagagagatggttgtgggaggggtagggaaggtcgtgggggtgtatgtaaagggaggcctgaaaccaagggtgggaggtcattccaggcaaagagagttgtccgtgagaggccgcagaggagagcgcgtggcctgtgctaggaaccgacagagtgctggagattaaaggagtgaatgatgtgtgtggagtggctggcactggtgagcgggtgaggtaataaatagcagcagggttattatcccactgtcagaaggctggaggctgcccaaccgcttcactcccgcgctccgggtctgtctgcccagggctttctctccctctctctctgtctctgtctctccctctctatctcctctgtctttctgtctctcttcccatctctctgtctctccctccctttctctccctctctcgcactgtctctctgtgtgtctcttcctctctctctctccctctctgccccctctgtctccccctctctgccccctctctcccccctttactgccccctctctctcttcctctctgccccctctgtctccccttctctgccccctctgcctccccctcactgctccctctgtctctccctctctgccccttctctctcccccctctaccccctctctctccccctctctgccccctttctctctccgtctctgccccctctctctctccctctctgcccctctgtctctccctctctgacccctctgtctctctctctctgcccctctgtctctccctctctgtcccctctgtctctcgtgatctgccctctgacctcacgatccccctgacctcgggatctctcgtgatccccctctgacctctctgcccttctgtctctctctctctgcccctctgtctctctctgtctgccccctctgtctctccctctctgcccctctgtctctccctgtctgcccctctgtctctctccctcccactgtgtgtgactttgggtgggtccctctcctctccctggttcctcatctgcttccaagactgccccctccctccctgagcccaaagagccgatgcctggggagggcccagcctggactaaggcccagcggcgggaggagcctgggttggaggccgggagcagtggggcgaacggcagcaaatatttatggagccaggtctgtgccaggctcagggctgggtgtggcgagataagggggccaggggaggcgcccggacttggcctccaacccgcttgccccagggaggccgggagccgggcagggggaggtgcccgggaaggagggctgggcgctggggtcgtgcaggcaggggtccccgtggagcctcgggcccctctggagagtggttcacacttcataggtcagctccagcctggttggtatgaagccttctcccacgaagaagccccgagcactctcgctgcggtggcacctcccggctgtccccggcttccccttgggcaccagtctgtgttttgttaatagcacctgaggtggaaacagatgggcttcaaggaagcaagtcacatggaattggacccgaatgcagattatcaaataagtatctgtgtgtctacactgatacaaagaaatacgaggatgaggccgggagtgttggctcacgcctgtaatcccagcactttgagaggccgaggcgggagcatcacctgaggtcaggagttccagaccagcctggccaacatagtgagatccctgtctctactaaaagtacaaaaattagccgggcgtggtgttgcgcgcctgtaatcccagctactcgggaagctgaggcaagagaatcacttgaatccaggaggcggaggttgcaatgagccgagatcgcaccactgcactccaacctgggcgacagagcgagacttgaaagaacgaaagaaagaaggaagggaggaaagaaggaaggaaggaagggagggagggggaaagggaaagaaagaaagaggcagatgagcgagttagcaggaaaaggtgaaggaacacatctctcttacagaataaaatttttttttttgagacagagtcctgctctatcccccaggctggagtgcagtggcacgatcactgcaaccactgcctcctgggttcaagcaattctcctgccgcagcctcccgagtagctgggataacaggtacgcgccaatgtgcccagctaatgtttttttttttttttgacacagagtctcactctgttgcccaggctggagtgcggtggcgcgatctcggctcactgcaagctccgcctccagggttcaagtgattctcctgcctcagcctccccagtagctgggactacaggtgcccgccaccacacctgggtaattgtttatatttttagtagagacaggatttcaccgtgtcagccaggatggtctcagtctcctgacctcgtgatccacccgccttggcctccgacagtgctgggattacaggcgtgagccaccgcgcccggctgtattcttaagaactgtctatctactcccccattctgaagaagggagcttaattcccccacagcccaaatgccccgtgggctgcactcggcggcttgtttacaaagactagatgaatggaaaggaaggggggtcacatacagtggggagagctggcaaacaccacccctgccaggtgaccagggtggtcaagcatgggtgagcagacatgagaacacgcacctcctgataggaggcgaagagaagggattttttttttcatactaaaaaaatttttttggctgggcgtggtggctcatgcctgtaatcccagcactttgggaggccaaggtgggtggatcacctgaggtcaagagttcaagaccaacctggtcaacatggtgaaaccccatctctactaaagattaaaaaattagctgggcatggtggcgcacgcctgtaatcccagctacttgggaggctgaggcaggggaatcgcttgaacctggaaggcggaggtcgtagtgagctgagatcatgctactgcactgcagcctggacaacaagagtaaaactccatctcaatttaaaaaaaatgttttttgaagagaaagggtctcactgggttgcccagaatggttctctaactcctgggttcaagcgatcctccctcctcagcttaccagatagctggaactataggtgtatgccaccaggcctggctaatttttaatttttaatttttttttagaggtggtgtcttgctatgttgcccaggctggtctcaaactcctggcctcaagcaatccacccacctcagcctcccaaagtgctgggattacaggtgtgagccaccttgcttggcccagaggggcattttgtgtgtgtaactgtcgtcctagctacacgggaggctgaggcaggagaaccacttgagcccaggggttggaggttacagtgagccaggatcacaccactgcactcctgcctgggcaacagagcgagactccatctcaaaaaaaagaggtttttttttttttgcgtttttgttatttattgattgatttatgtattagttcatcagctgttagtgtattttatgtgtgacctgagataattcttccaatgtgggccagggaagccacaagattggacacccctgccctgcaggcttcagaggcagtgtggccctgccgacaccttgaccccagacttgcagccccagatccctgggacagcacacttccgtgctctgctttgccaggactgctctaaactgtcaaagtcatcagaacgaggcaagtctgagaaacagtggcagacagtaagagattaaggaggcatgacggtgagacgccatgtggtatcctgggtgggatcctgaatggaaaaaggtcgttcgtgacatctgagtaaagggcagagttttgtgctgtactagtgtttgcttcttggttttgacagacgtgccatggtaatgggagacgagaacatttggggaaattgggtgaggggtctgtagcaagtctactatcactcactgcagctctactatcccgtcttaaatgtttctaaacaaaaaagtttatgtaagaaagaaaaccaggtgggcttatgggtacttttgccacactccccaccaggctattcacacagaagccagggagaatctgtcataccaggagaggggagtttgtgttattcaggtgtatgtctttgtccaaatgtatcaaatggtaacttgggaaatgtggcatttcactgtattttaattttactaatgacaagaagcttaaatatttgatatcttgttatgttatgcatgctaataaaacatcaaacaaaaaagaaaaagttttttaaaaaccaaaaaaaaatgttatgcatgctgaagtgtttaggagtgaactgatatgttgctttgagaattgcaagttgcatagagaaagatgaatatatgagaactctctgtgctttctgttcaattttgctatgaacctacaacttctctaaaaaataaaatgtattaattttataaagatggatgatggatgaatcaatgatggatagatggatggatgatgcatgaatggataggtgaatggatggatggatgatggatggatgaatggatggttggatgaatgggtgaatggatggatggatgatggatggatgaatggatgaatgggtgaatcaattgatgaatgaatagatggatggatgggcagatgggcagatggataaatgaatgaatgaatggatgggtgaatggatagatggataggtgaatggatgatggatgaatgaatagataatggatgatggatgaatgggtggatggatggatggatggatggatggatggatggatggatgaatgggtggctaaatggatagatgcatagatggatggatgatggatggataggtgaatggatggtggatgaatgggtggatgggtgaatgaatggatggatggttgggtaaatggttggatgagtgagtagatagatggatggatgatggatgagtgaatggataaatagatgggtaaatgatggatggatgggtggatgaatagatgaatagatggatggattatggatggatgtatagatggatggctgatggataaatgggtgaatggatgaatggataatggatggatggatgggtgtatggaaggatggatggatgtgggaatggatgggttcatggatggatggatgaatgtagagaatgggtacatagacattcgctgcacaattatttttatttccttatgtttttatatttttataatgacacgctaaaaggaaaaaggaacgtcgaatcctgtcagcctctgcatgaattcctccaagatttccatctcattttgatcagaaattgggttctcatgactctctacccaatctggtaccccatcacctccttgatctcctctcccattgctccctcctttgctcactcctctccagccacattggcccctctgctccttgaacactccagctatgtcccctcctcagaacttttgcatcagatgtgcccttcctctgggacacatcccagttatctgcactgctctctcgttcagctcttggcctacacaactgaagttcctacatgccctgtcttgcattgtctttctccatagcatttctctttctctaagacgttttataatttactttcttgctatgttttcttgcctgacttccctcactagaatggaagccccacctaaagagggattcatctattttgttaaccaatgaataagctgcaccttggacagtgcctggcacatagtagaggctcagtaatgagttttaggatgagtgaatggaagactgaatgaggccgggcgcagtggctcacgcctttaatcccagcacttttggaggctgaggcggacagatcacctgaggtcaggagttcgagaacagcctggccaacatggtgaaacctcatctctactaaaaataaaaaaattagccgggagtggtggcacatgcctgtaatcttagctactcgggaagctgaggcatgagaatcgcttgaagccaggaggcagaggttgcagtgagctgagatcgtgccactgtactccagcctgggtgacagagtgagactccgtctccaaaaaaaaaaaaaaaaaaaaaaaacttaatgaatgaggtaaggatgaagcattgtgtaaagtttaaaagcccaggctttgcagtcacaatgcctgggatcaaatctggcatggtacttactagctgtgtggccttggctaattcatttcacatttctgtacttgagttttctcaggaaagcagggcctactgggaacctcataatcgctagtgggctgtaaatggtacagccactttgggaaacagtctggcactttcttaaaaagtgaatcacacacttcccacacagcctagcaattctgctcctagaaatctgccccaaagaaatgaaaacatatgcccacacaaagacctgttgctgggcgcagtggctcaggcctataatcccagcactttgggaggctgaggcaggtggatcaccagaggtcaggagtttgagactagcgtggccaacatggtgaaaccccgtctccactaaaaatgcaaaaattagctgggtgtggtggtgtgcccctgtaatccctgctactcgggaggctgaggtgggagagttgcttgaacctcagaggcagaggctgcagtgagccgagactgcacaccactgcactccagcctgggcaacagagcaagatcccgtcaaaaaaaaaaaaaaagaaaaaaaacaaaggccgggcatggtggctcatgcctgtaatcccagcactttttggaggacgaggcaggcagatcatgaggtcaagagattgagaccatcctggctgacagggtgaaaccctgtctctactaaaaatacaaaaattagctgggtgtggtggctggtgcctgcagtcccagctactcaggaggctgaggcaggagaatggcatgaacccgggaggcggagcttgcagtgagcagagatcatgccactgcactccagcctgggcaacagagcgagactccgtctctaaacaaaaaaaaaagacttgtacatgcatgttcacagcagcattacttaaacagccaaagagtagaaacaatacaaacacccatcaacggatgagaggataaacaatgtgtggtgtatccatacagtggaatattattcagctgtaaaaaaggaatgaagagggtgggtgcaatggctcatgcctttgatcccagcagtttgggagatcaaggtgggaggattgcttgagcctaggagttgaagatcagctcgggcaacatagtgagacccccatctctacaagaaataaaaatattatccaggtgtcatgatgcaccctgtggtcccagctgctcaggaaactggggagagatggatcacttgaggttgaggctgcagtgagccatgatagcaccactggactctagcctgggcaacaaagtgaggccttctctcaataacagcaacaacaacaactaaaaagcaattaagtactgaactgacacaatttacaatgtgaatagaccttgaagacattatgctaagaggaggaaggcagtcaccaaagctacatatggcatattccatttatatgaaatgtctagaataggttcatccatagagacaaaatagattcgtggttgcccagagctgagggtgggaatggaaaatgactattaacaggcacagaatgtctttttgaggtgatcaaaatattctttttaaaatttttaattaattcatcaatttatttattattattattattttttagagacaggatcttgttctgtggccttggctggagttcagtggtgtgatcatagctcactgcagccttcaactcatatagctcactgcagccttcaactcctgggctcaagacaccctcccacctccgtctcccaagtagctgggattacaggcacttgccaccacagccagctaatttttgttcaatgttttgtagcgacagggtcttgctttgttgtccaggctggtctcaaactcttggctccaagtgctcctgccgcctcagcttcccaaagtgctgggattacagacctgagccaccacacccagcctggaaatattctaaaattgga[134 bp omitted]aaaccccgttcatactaaaaatacaaaaaaaaattagtgaggcgtagtggcaggcacctgtaatcccagctacttgggtggctaaggcagagaattgcttgaacccaggaggcggaggttgcagtgaaccgagatcaagccactgcacttgagcctgggcaacagagtgagactctgtctaaaaaaaaaaaaaaaattatcgaattgtacgaccaaatggatgaagtctatatgtaaatggtacctcagtaaagctgtttatgaaaaggcaaaacgaaaacagagccaataatagtatctattttatgtggctgttgtgaggattaaatgggctaatctacgtagtacccttgaagcagacatagggtgaat[139 bp omitted]atggagaaaccttgtctctactaaaaatacaaaattagccgggcatggtggtgcatgcctgtaaccccagctactcgggaggctgaggctggagaagcacttgaacccaggaggcggaggttgcggtgagccgagatcgtgccattgcactccagcctgggcaacaagagtgaactccgtctcaaaaaacaaacaaacaagcaaaaacaaacaaatgtggttgcgatcgtacgtgtaaagtgttcagcaagtgaaagacaaatggcaggtcgtgttccctacataaccacaactccttcaataatcaccgtcatttggtgactttatcattctctgcatctgtcccacgcatctggcctcagttttccacctgcgcaatgaaaaagctgggctctatctccaaggccgtcttctctttgtcaattctgtatttggttctgaaaatgtttctcttcgaggcggcagatctgcaatgagaagggtgggcaaacccatagagccgaggtggggcccgcgggtcctggagaccaacatgtgtgtaggaaggggcctgaaagtgggctgtgtggtgggagctgacggggagggtaagattggcctgggtaagggttcgaggaccaggtctgccaatttgtaaccgtgatatcttggacaaggaacttcctctctgcatccagaaaatggggagggtgtttcctgcctccccgtggagcagtgaggattcattgagatcatgtatataccagccagggagaataatagctaaaagtaccaacagcaacaaccaacagcaacaactttttctctccatttttttttttttttttttttttttttagctctgtcacccaggctggagtgcagtggcatgatcttgactcactgcaacctccacctcccaggttcaagcaattctcctgccttagcctccccagtagctgggattacaggcatacgacaccatgcttggctaatttttgtatttttagtagagatggggttttaccatgttggctaggctggcctcgaactcctgacctcagatgatccacccacatcagcctcccaaagtgctgggattacaggtgtgagccactgcgcccggccaacagcaacaactacttaccaggcccaagcactgtcttcagccctttccactaagtaacccatttaatatgcaaggctcatttcatagtagtgattactgaagcaggacaaatggcttctttgctttaagccccaatctggcccttctataagtagagctatgtaattccctcgtttgatgggttttgtccatgacattgtatggataaggtgtctggccatggtaggctctcactaaataggagcccacattaagatatggtaatagggagccactgatggttcctgaggagggagtagctttgatgtaataaaagcagacttcagcctcccatctccccaacacttgacgcttggttatagtttctcataggatctagttctttggggaaccagtctcatttggtaaccctaatctattcgtgccaatattgggttattgttcatctcctgagctggatggttggtgtcaaaagagtgcctaaggggtgtcatcaaatactagccccaacatccagcactgggcttaaactcagtgataaacagttgggacaggccaggtacagtagctcacgactgtaatgccagcactttgggaggctgagtggggaggatcgcttgaggccgggagttggaaaccagcctgggcaacatagtg[131 bp omitted]aaacctcatctctactaaaaatacaaaaaattagctaggcatggtggtgggtgcctgtaatcccagctacttgggaggctgaggcagagaattgcttgaacccgggaagcagaggttgcactgagctgagatcccgccactgcactccagcctggcgacagagcgagactctgtcttaaaataaaataaaataaaataaaataaaataaaataaaataaaataaaataaataaaataataaaataaaataaaataataaaataaaaattagccaggcatggtgatacaaatttgtagtcccagctactccagaggctgaggcaggaggatcacttgagcccaagagatggaggctgcagtgagctatgattgcgccactgcactccagcctgggcaaaaaagtgagaccgtttcaaaaaaaaaaaaaaaatcaaacaaactaatccatacaagccggcacagtgctaagggctcagccaagatgtgtgaaatcattgaaggtggaattatttgaagctttcggtgtcatcctctcccaccttgaccctcaatcaccatctttcttgcttctctgcctcctttgatccatctagtattgttgacgcactggggaaacagcttccctctcagagcttcagtttgttgtcctggaaaagggggaggctctgcccctttcttgctgtttcttgtgggtgtgcaggtacctaagtagtcaacgtcttttttttttttttttttttttttgagatggagtctcgctctgtcgcccaggctgcagtgcagtgttgcaatctcagctcactgcaacctccacctcctgggttcaagcaattctcctgtctc[133 bp omitted]tcagcctcccaaagtgctgggattataggcataaaccactgcaccccgcccatcattatttgcatagggcaagagagaaccatcgaaggtgctgggggaaagcaggatgtcaagagaaggaaagagaaaggtgtttaaggaagattagctgagagatatccctcttccttccactcctggaacctaaataaacgggtaaaaagaaaacaactgggccaggcgcggtggctcatgcctgtaatcccagcactttgggaggctgaggtgggtggatcatgaggtcaggtggtcacgagatcaggagttcaagaccagcctggccaatatggtgaaactccatctctactaaaaacacaaaaattagctgggtgcggtggcaggcgcctgtaatcccagctactcgggaggctaaggcaggagaattgcttgaacctgggaggcggaggttgcagtgagctgagatcgtgccactgcactccagcctgggtgacagtgcaagactccatctcgaaaaaaaaaaaaccaaaaaaacaaaaaaccaaaaaaacccaacaacttgaagatgtgtagaaattgaaacttcccacctcacctccaattacctgcagtttctaaaatatgtagtaatggccaggtgcagtggctcatgctggtaatcccagcactttgggaggctgtggcaggaggcttccttgatcccaggagtccaagaccagcctgggcaacatagggagacaccatctccacaaaaaatttaaaaattagtcaagcatggccgggcacagtggctcactcctgtaatcccagcactttgggaggccgaagcaggaggatcacgaggtcaggagatcgagactatcctggctaacacggtgaaacccagtctctactaaaaatacaaaaaatcagccgggtgtggtggcgggtgcctgtagtcccagctactcgggaggctgaggcaggagaatggcgtgaacctgggaggtggagcttgcagtgagaggagatcacgccaccgcactctagcctgggtgacagagcgagactccgtctcaaaagaataaataaataaataaataaaataaaaattagtcaagcatgatggtgcacacctgtagtcccagctacttgggaggctgagaagagagaatcccttgagccaggaagtcgaggctgcagtgagctgtgatcgcaccactgcactccagcctgggcaatagagcaagatcctgtgtccaaaaaaaaaaaaaaaaatcctgtagtacctacctcctagcctttgcccctgttttttctttgtctggtgttgtcttctcacagatgtttctctctcatacctggttccctccatcttcattcaaatcaaacatcgcctggccagagaagccccaacccccagtcctgctctgccatcatactgtctggtggtttactcttggtagcccttatacctggtgctatattgcatcctgctaggacttttttcaatgatgtaatgttctagatctgtcctgtccaatatggcagccaccag[136 bp omitted]tgtggtgaaacccgtctctactaaaaatacaaaaaattagttggttgtggtagcaggctcctgtaatcccagctactcgggaggctgaggcaggagaatcccttgaacctgggaggtggaggttgcagtgagccaaggtcgtgccattgtactccagcctgggcgacaagagtgaaactctctctctctctcaaaaaaaaaaaaagagtgaagagtgtgactgaggaaccgaacttttacatttatttcatcttaatgtctttacatttccatattctaaatttaaacggaaatagccacgtgtgtctgctggatatcatattggacagtgaagatgtagaatatcccatcatcacaaaaagttctcccagactgggcaagatagcaagactccgtctctgcaagaaatgaaacaatcagctgggtgtggtggcatgcacctgtagtcctagctccttgagaggctaagaggattgcttgggtctgggagtttgagactgcagtgagctatgactgcaccacggcactgcagcttgggcaacagagtgagggaagaaagattatggaaacttttctgagaaaaaaaaaaagttatgttggacaatgcagggctagaattccagctctttcagaggaaggtattggactcctcctcagtgcctagtaccaccgctgacacagagtaagggtgtggtagagattgactgagtaaggcgcggagcttccacagggcagtggtgaggataatcgcgcggagcttccacagggcagcggtgacgatgatctatcttctcacattcctgtttcttctcaacccagccttcaccggcttcttgcttggttgagggccacatattttctgatgcatctgtgtccttcctgctctgaacccaagttcagagttggctggacaaatcctgactcgccccagcgcccccagcctgccccacctccacagaacacctcgctctcttggatttcacgaactcacatttattcacagacagacaaagggacaaggacagacctttgctcactggggacccccagggtctggcagttccaaagaggtgatggtgtccagtgtgtgaaacgggggacagggaggcgggggcgtccccaccagtctccatccctctggccaactgtccgccgcctttttttccaagtcgtcctgccttaagacacatgttggggtgagcggttcctaaccagcatcaggggttctgggggcgggcgatgggggaggaaggggcagtccagggccccccactccttagtgtcaagggcgtgaaggggacgggtgggtagacagaggaggtggctccttcaacttccctcctccattctgcaaaccggggagctcaggcggagcggcggagggcagggcggcgaaggtcaggaggccaggccccccagcccgcgcaggtgagccttgctgtctacctcttcctcctccatctcgaaggctgagtggtcttggctgtcgaaacaggaggcgctgaggaagacagggggagccggcggggactggggtggggtccccggagagggcggctcttccttaatgtttgcgaggggcagcgggagcccttcttcctcctgctcggccttcaggggcggcgggggcggtggcggcgacgtcggggcctgggcctgcagtgcctgcagcgcggcggccctctccagctctgcgcggtggcagcgctggtggcgcaggaggctgtaggcgcgcgagaagcggcgcgggcagcgggggcacgggtgcggggctgggccccccgcgtgcacctgtgcgtggcgcgccaggtcggccaggcgcttgaactcccgctggcagcgcacgcactggaaggggcgcgctcccgagtgggtcaccccgtgctgccgcaggtgcgcccggcgcctgaaacctttgccgcactctgggcaccagaagcggggctccccggcggggggccgagccggggcggcgtcgcctccgttctgcccttctcccccttccgaggcacccccgcactccgccccctcgcccccctccggccccttggctgagttccgtgcacccgaggccttgtcgtccttcttgcccgccgcgggcagcggggccagcaggctgagggggccgtggacgcggcggtgctggcggaggtaggaggcgaggcggaaggccaggccgcagtctgggcacacgaaagggcggtcggtggagtggaccagccggtggcgcgacagggaccagggcctggcgaaggccttgaggcagatggagcactggtgtcgcttggggcgtggcgggggccccccttccccttcctgttcgccctcggggcgcagacacgggtgcgccttgagctcgcccttggtggcgaaggcttcgcggcagcgcagacacagcagcgtccagtctgcctggagcaggacctgtttctcctcctgccgcccggccgccagcgccagctcggccctcagctctgctgccccggcctcggcctcctccgactccgactcccggggctccgcggcgctggtgggcgcagccagcgtggaaggctcccccgcaggccacgtctcaggccacgctgcgaccgcctcctcctccgtggcccctgctgcagcggtggtgggcggctccgagccctcgtcctgcgggccccagctgggttcggccgtctccttggccaccctctcgatggccagctcgacctcgccgcccgcgtgctcctgagccaggtggcgcctgagctgggccggttctgggaaggtgcgggggcaggcggcgcagcgcagcgggggctggggcccgtggccgcgcaggtggcgggaaaggtgggccggccggcggaaggccttggggcacagcgggcaggcgtggggccggagccccgagtggctcagccggtgccgggagaggtagtaggggaaacggaagaggcggccgcaggtggggcagggcaggggcgccctaggggctccagcgccccccctgccacggccacggccccgaccacggcctcggccacggccccggcctcggccacggtgaggtgggctgccctgggcgggtggaggaggctgcggatccatgcctgtggggagagaggggagagatgggaagcggggcagagataaaaagaggtgcgtggggtgtggcagaaagagaagcagagacagtcagagatggagaggcagagagggtcaggtatttagccaggagagagatatgagacagagacaaagatgagagacaccgaggggaggccagagatggagagacaggaggagagagatcagagacagagcgacagagcagggaatagagacaggagaaggcagagatgggagacacagagaagtggggatggacagacagagaccaggagtcgcagaaagacaggatggtgaaaggcagagcagagaagagacagaggagagtgaggaacacccagcagagagacagagacacagagaagaggaaacaaagagacttggagaaccagaggcagagatagtgcaagagcagagatcagaagagcagtggcgggttgggggccggagagacagggagacagagacacagagggagtgaactgggcagaggcacggagggggacaaagtcagcgaaccgcttctgctccaggtcccccggccaggctgaacgttttgggaggggctgggacacagcccatggggcctgagtggagggggtgggatttgaagccggtaggccccggaaatagagtgtgttctcagatgccaggggctgggagaggtcggggagtaggagggttcagacttctggtctgagttgggagggggctaggggcccagactcttgggactgatggggatgggagctggggattgagactcctgggtccaggtcatgacggattggggaatctggactctggtatggaggaggtgtggattcctgggtcccggtggaggaggggctggggagggggctgggctcccaggacaagggggaggcgggggctggggacccagctgccgggaatccccagggaggaggcgactgagggccggacccctggactcgggagggaggctggtgggggtcgggggtcccaggtcctagaggggggccgatctcctccgggccaagcctgcagctccccgaaggcatgatcagcagaattggggccgggtcgaggccttgaggatttctcagccctgggcctggggcttggtcctggtcgctggggctgggttcttacctcgcctccttggctcctttcttccttccccacggccggccaaacgcggacggtggtggcggggagggaggggggcctgagcgtggtggggggtggaggaggaggctgggctcggtgtcactgcctaagccttccccccggaaacctggcctttcctcggagcctgaaagaggaaagactggctgggaagccggaagcgggaggacgggggacctggagaggggagggaaggcagcttgcactacagggtcctgtgaggggagggggctgggggcctgtcccccgggctcccagagggcggagggtgctgagggcctggaacactgggtccagctactcccggctccccaacatgcacacacacatattcattcattccttcaacaaatacacatttatcaggtcctgtctgtgccaggcactgtgtcaggccaggggagtggccgggggaggaagatgaatgaatcagtgacagaggcttcaggaagtactggcactctggatcagaacctggctccagccttcccttggctgtctgggtgaaggattctcccacttcgagcctcggtttccccctttgtgaaagcccctgcatatactcattcaaccctaagcgaccaatatttactgaatatctactacgggccagcctgcatatatttgtctacatatacgcatattcactgggaccttagcagccaatgtttactgagcacctactatgggctggtgctgtccttggtgctggagtcacagtggcaaaaaccggagctcactgtctgatggggaaggcagatagatacggatcaatcacgctggagtgcatgtgggggaacgtgtgctccgaggcagggaactgctatgggaatgcagagaacagaaggcactgagctgagctcacactgggaggaggtgattcctgaggtcttcctggaggcagcaatgtttcagctgaaattggcagaatgaaaccaacctggcgacatctcagaaacctattctggagcagaaaaggcattttgcaggagtatacccacagcttgacgctgtttgtttaaggttacattcctgccaaacagtgctaatgagagtgcgagcaaacaggtcctttcatacacggctggggcaagtagaacctggaacattcttaccgagccagcaattccaggaatttattcttcagaggcatctactcggaactgcacaaaataatgtctgcaccaggttaatcattgcagtactgcacatcactgcaaacagctgaaaccaatctaaacacccatctgtaggagagctgagtaataaatcatgactgatccacccagtggaatactaggtgtccatagaaaagaacaaagaagctcaccgtgtgcatatatggtaagtctccaagtgataacctgtagaagagaaaaatggaaggtcaagtacagcctgcagcctgttctgggtttgtgtgtgttctgggattgtgtccagatgaactggaacaagagagaagaaactgaaactggcaacatagtctaacttccaggacagaaatttactacactctatccttgtttttttgtttgtttgtttttttttgttttgttttgttttcttttgagatgagatctccttctgttgcccaggctggctggaggaagtgcagtggtgtgatctcggctcactgcagcctcgacctcccgggctcaagcaatcctcccacctcagcctcctgagtaggtggggctacaggagtgtgccaccatgtctggctaatttttgtatgttttgtagagatggggtctccctatgttgcccaggctgggcttgaactcctgggctcaagcaatccacctgcctcggcctcccaaagtgctggaattacagacattagccactgtgcccggctttttgtactttttgaattcaaaaccgtgtgaatgtgctatatactcaaaaaagtaaaggaggccaagcatggtggctcacgcctgtaatctcagcactttgggaggcccaggtgggcagatcacctgaggccaggagttcaagaccagcctggcccacatggtgaaaccccatctctacaaaaggtacaaaaattagccaggcataatggcacatgcctataatcccagctactcaggaggctgaggcaggagaatggcttgaacctgggaggcagaggttgcagtgcgctgagatcgtgccattgcactccagcctgggcaacagagcaaaactccacctcaaaaaaaaaaaaaaaaaaaaaaagaaaagaaaaaagtaaaggaaaaagaaatacatggggattataaaaataaatgaaatgaaaaataatagcttactcttgtgagcgtattacaaatatgatcccatttactccttgctttatgaagtaggtaccattatttttcccttttacagaggatgaaagtgagatactagaagtttccaaacctagcgagtctcagtaagaagtttcacttcacaaacagataggagaaatgatagtggat[132 bp omitted]tgaaaccgtctctactaaaaatacaaaaattagctgggcatggtggtgcgcgcctgcaatcccagctagtccggaggctgaggcaggagaatcgcttgatcctgggaggcggaagttgcagtgagccgagatcgtgccactgtactccagcctgcgacagggcaagactccgtctcaaataaataaataaataaataaataaataaataaataaataaataaaataggaatggggtctcactctgttgcccaagctagtcttgaattcctgagctcaagcaatccttccacctcagcctccgaaagtgctgggattacaggcattaactaccgtgcccagactaggagcatgctttttaaaagcaccttgtccataatactatattttaaagaatatataccatggaataaaagtctaaaaatgtctgtggtaataataggcaccaaattcaagatataagttatgtttgagataggagaggcaatcagatcttggagggggtggtccgcggggagtcatttgtatccctaatatttcaaagctggtagtcagaatatgggtgtgtgtattttaacatgttttttgtaaaatacacttaaactttataattgtaaccattttaaatcacacagctcaatggcactaagtaaatgttgcacaactatccacgctgtctagttccagaactctttttttttttttttttttgagacagagttacactcttgttgcctaagctggagtgcaatggcgtgatctcggctcaccgcaatctccgcctcctgggttcaagcgattctcctgcctcagtctcccaaatagttgggattacaggcatgtgccaccatgcccagcttattttgtatttttagtagagacagggtttctccat[133 bp omitted]gttccctagcctcatctgaactcctggtctcaagccatcctcccacctgagcctcctaaagtgctaggattacaggcgtatgccaccatgtccagcctagttccagaaccttttcatcagcccaaacaaaccctaagcccattagcagtcattcccacactcccttctatccccagcccctgtcaactaataatcagttttctgtctctatgaatttgcctattctggacatttcatatcaatggaataatcataccatatgtgttcctttgtgactagcttctttcactttgcataaaagtttctcctcctcctccacaaaggacattgcccccctctttttaaaaagtgagacagggtctttctctgtcgcccaggcaggagtgcattggtgcaatcacggctcactgcaacctccaccaccagggctcaagcgattctcccacctcagcctcccagatagctgagactacgggcatgcaccaccacgcctggctgatttttgtttttggtagagatgggatctcgccatgttgcccagtgtggtcttgaactcctgggctcagatgaccagcccacctcggcctcctgaagcactgggattacaggcgtgagccacctcacctggccagcataatgtttctaagcttcatgcgtgccatggcatgagttggttcttcactcctttttgtggctgaatagtattcctctgcgtgagtgcagtcatccctcggtgtccgcaggggattggttccaggactctcctcagattccaaatccctgggtgatcgagtcccttacagcctcctatctgagggtgcagaacccacggatgtggagggccgctgtcacctacattttgtttatccattcatttgttgatggatatttgggttgcatctatctttgggctattgtgaatagtgctgttataaacattggtgtgtaagtttttgtttgaacagctgtttttaattcttttgggtatataccaaggatgtgtgtactattttatcatctatattttgaaggcttgaaagatggatgaggaggagaaataataatgaattcaggaatggaggtgatagaaaagaaaactttaagcagagagcacagcacatggaagggggtttgcgctctgcttccccagcacatggcgggggatggggttgggggtcttgcattagggcataaaggaggccagtgtggcggagagaggccagagctgcacccagcgaccgtgccgggcctccgagtccaggctgagcttggactcattccgagtgcactgagaagccattgaaaaggttttaagcaggagagtcacatgatccgattagtgttttagagaaattcctgtgggacccgcgtggaggccgggccggatgctggggagaccgaggcggggagccgggaggaggggggcgggggcccaggtgctagagggggggcctgggcccctcgacctccggctgggaaggcggctccctgggcagggggcggggcttgtcgctgactggctcagggctggactccccgatgccagtcccaccgtctccccctcctcattggctctcctgcttccagcccccccctctcccgtgcagcctccagcacccagaaatcatatcacctcactcctgagcccaacaccctcccgtccatggctccccatctccctcggaataacacccagagcttccctaatgacccccacgtgcacccccgtcctcaaggccctgcttgcctggaccccggtgcctccctcccttcctacctccctctccgcgttacatcgccctctccgctctgtcccgagttagggcctttgcacttgcggttgccccggcctggaaagccctcccgaggtttgcatccagcttcgcttacgtccctcactcctacagcttcctggagacacctgtcttgtccacccaggctaaaatagcctctcgtcaccctctggccttcaccttgccttaattttcttttttcttttctttttttcttttttctttctttttttttttcagtcagggtctcgctctgtcgcccaggctggcgtgcagtgatgcaatcccagctcactgcaacctccgcctcttgggttcaagcgattctcctgcctcagc[131 bp omitted]gtctcggcctccctaagtgctgggattacagacgtgagccacggcgccggcctttaattttcaacatggtacttatcacgaacacacactaggcaatgtgtgaatgtcccatggattccctatctcccctgccactagaataaaaactccacaagggaaggggcttgttttgcctgtttaacggctctgcccacaggtggctgcccgggacagacaaggggcttaacaagcatttgtggatgaataaaaagggatgaagggtgggaggagtgaggctgttcctgaaaggaagaaggctcgggggcccgggggagactcccgctcaggcaagcgtgcaggacgctggctggctccaaggtctgcacgcaggaatcagctcgccaaacacaggcgtgtgagtcgccggcgtctggctagtaattaatgttttgcaacggttgagatcgtcctcagggtaaaattcccgctcctgtcctctcctcgcttcccaccccccctccaacctcaatcagcgtatctataaaatggggccgctatgtgacgcgttgggtgcagtgtccagtccagcaccgggcgcttgtgagacacggaggaaatgggatgggtccttctcgttaccgccccagaagagaaaggactgtggtgcaggtgaggtgggtgggaacctcagcctcgcgaggtccctattcattactccctggccggcggccatctccatggcaacgctggcgcctttccagtgcgcagctccggggctcagcctgtctctaagccggtctcggagtgggcgggtcttgtccctgggggcggtgcctgcttcgaagtgggcgggccttgtttctcgaaagaagatactttttttctcaaaccagaaagcatgtctggtttttgagtggcggttgcagagtggagaggaatatctctaagatttagctgattttattcccaaaggttgagctttttcaaacaggcaacagtggatctccattcaaaaagtctcccttgagtgctaaactcttacttgttttctcctcccagaatatgtcttcctcctttaaattttcctttctttttctttcttttttaatttatattttaaattttaattaattaatttattttttcagacggacgtctcgctctgtcacccgggctggagtgcagtggcatgttcttgggtcactgcaacctctgccttctaggttcaagcgattctcccgcctcagtctctcgagtagctgggattacaggcgtgcaccaccatgcccagctaattttcgtatttttagtagagacggcatttcaccatattgcccagggtggtcctgaactcaagtgatccgcctgcctcagcctccaaaagtgctgggattacaggcgtgagccaacacgttcggaattattttttatttttgagacggggtcgcactctgtcgcccaggctggagtgcagtggtgcgatcatagctcactgcaacctcgacctcctgagctcaagtgatcctctcagctcagcctcccaagtaactgggactacaggcgtgcaccaccatgccggttttttgtttgtttgtttgttttgtttttggtagagacaggatctcactatgttgcctaggctggtctcgaactcctgagctcaagccatcctcctgcctcagcctctgaaattgctgggattacagacatgagtcaactcgcccagcctaaaatatcttctttgtgaaatataagacacacagagaaaaaatgcacaatacaaacacacaattgaataaataattataaaatgatcgtccgattaagaactagaactttgtcggctatcagcaaccgtggaaacttccaggatatcccctcccgcttaacttgtccagtccactattctgagttttataggacattgttgtccttgcttttttatatggtttactactgacaatgtatccttaacaatattacagtttagttttatgtgcattataatgggtttgctttttttttttttttttttttggagacagggtctccctctgttggccaggctggaatgcagtggaatgatcttagctcactgcaacctccgtccccctaccccaggctccagcgatcctcctgtctcagccccccgagtagctgggcctacaggcacacgccaccacacctggctattttttgtatttttactcgagacggggtcttgccatgttgcccaggctgatctcgaactcctggactcaagcaatcctcctgccttggccttccaaagtgctgggactataggcgtgagccactgcacctggcctcaatgttatgtaaatgaaatcatgctctgtttctggctttttgggtcctgtatctttgtaactttcattcatgatactgtgtttatctgcagctcattcattcttgttgccgtatagtattccactgcataatatgccatcgctaattatccactgtattgctgatgggcgttttggttgtcctgagtttggggttgaaagtattgctgctatgaatgtttttgtatgtctctgggtgcagggggacttgagttagcatttacgcctagcagtagaattcctgcatcacaggatatatgtatgttcaatatttgagaatggca[135 bp omitted]tgaaagcccgtctctactaaaaatacaaaaattagctaggtgtagtggtgcacatctgtaatcccagctacttgggaggctaaggcatgagaatcacttgaacccaggaggtggagtttgctgtgagccgagatcacactattgcactccagtctgggcaacagagtgagcccctatctcaaaaacaaacaaaaaaatcttaaggaactaaaggggaggaaactttgattctcctaaactcctacttaaatgtgtcctccctcagttttctggtcttagtaagaaatgccaccactcaaccatttattcctgatttctcccttcccattacactcacccccaaccaatacacacatgcacacaaccagtcctctgcattcgtactccagagttcatctccaacccacccatttctttgttttgttttattttattatgtttagtacagacagggtcccactatgttgcctaggctggtctcaaactcctgagctcaagtgattctcccgcctcgacctcccaaagtgctggggttacaggcgtgatttctgttggtcactctggtttaggctcccacaagtttctcctggactgcaggagcgctgcactctcctgactctgcgtcctgcagcttcgtttacactcagcagccacagggatcttggtaagatgcaagggtggtcccttccctcctcgattaacactttgcttcccatcacccagagaacacagtcaaacacctgttttggcttgcctggcttactgtgatgtgacgtctacccacctgttaacctcatctcatccttccctccctgagctcactttcctcctgtgtccatttgggcatcctcctggcaggtccttgctcacccttacccttcagggctcagatcaaacgccacctccgccgagaagcccacatggaccaccccatctaaggtggcataaaaagtgagtaaggtggccattcattttcttaccacccttccctattgccttcagaatgctcaggacgatctgaaattattttctacatttacttgattcctcttttctccatacccgtcgcctacacgacagaacataaaccccaggagggccgggatgatccccacagggagttccaacgcctggctcagaataagccttcagtacgggaacacaatgcagtgtgcaggagacagtctgaaggcacccccacccccaattctctgatgagcgggtcctattctgggggtctggtatagggtccaaggcagcatctaagaggcggggcctctgctcagacacgcctctaatgaggcagtttggtttccaaggggtgtgtcctataagattggtgacttctaaagggcgtgtctagtttctagggggcgtgtccgtctgttggaggtggatcatgtatttaagggacggaactcattttgattgatactgactctaattgtatttatttatgaaacagagtctcgctctgttgctcaggctggagtgcagtggtgcaatatcggctcactgcaacctccacctcccaggttcaagagatcctcctgcctcagcctcccgagtagctgggattacaggcatgtgccatcacacccggctaatttttgtatttttagtagaaacagggtttccccatgttggccaggcacggtcttgaactcctgacctcaggttatctgcctcggcctccccaagtgctgggattacaagcgtgagccaccaagcccagcctaaaccgactctaatttaaaagggcatgtactattcaaagctttgaaacttctcaggagaaaacgaggacccgtctctatttagggagtctgtcctaagagattccccatcccccccgcctggagccaaggatcagaaaatgaggcatcagcgactgacaggacaaggtttattgggggtcctggaaacactggggagagggacgagggggcaaggtcgaggctcacaggggcaccccctagccaaatgcccccttcccctagggattgggaggaagacagagacagacaaaccaacagagatggagagaaagaccaacggatgctacggagagagggaaggaaaccccagtgtccaccacctcccactcagatgagttcacaggataaagaattgcgtggaccggtccacacgctacaggaaaagagaggagtgtccgccctattcactctaaggaaggtggcaggccacagcctagaccagcccattccatgtgatgggggtgtgtgcacatagatcagtccattctactgggcaaggggatttcaggccagtctattctagtgtttggggcggggaagatcgttagggtcgatccattccacagtcggggaggggggattcgagggcagggggcatctaccctggtccctctttcagcacagggaatgaaaaaggggaaaggcagatttcggctatatccattttctggggtcaccagtgactctggtgggtggcatttggagggatctaggaaaattcagggacatgctccctccacattctccagatcaaggtcgttaggaatgatggctctcagggaatggggcagtcttcccttggtgggggtgggtgcccatcttttagtattagggctctcaagatgagaggtacttgtggagacccattgctcactgcaaagtccccatgtcttggggacttacggctacccacactcattccagggacctcaggctcaggagtctctccctagatttgggctcccctgccccagctaaggaccctgtttgtttgtggtcccccagctccggggcctttgtgggtttttggtggcccccacctctccagtcagggtcccctcatttcagggcctgcgtctggatttggatttggagggccggggcctcacgcgcagtcccgaggtcccctggtccaggccgagtccaggaggctgggtggagggcagggcgcacgcagcctggcagtcagtccatgccccggtgcagcttcaggtgcctggagaggttgctgagcgtgatgaagcccttgccgcagatgtggcaagggaagggccgctcggtgccgtgcagcagccggtggcgcttgaggtagcactcgtggcggaagaacttgccgcactccaggcacgggaacggcttctcgccagtgtgcaccagcacgtgccgctccaggtctcgcggtgagcggaacagcttctcgcactcggagcagccgaagatcttcttgccgcggccggagccagacgggggttccccggacgccggttccctttcccgggcggcggtcgccgcctcctccccgccgccctcaccgtggctgacccgccggtgctcctccaaggcggccagcgccgcgtacagagccccgcagtggccgcagccgtaggtggccgggcccgagtgggcctccaggtgactggccagggccgcggccgacgcaaagaaggtcccgcagtcgcactggtacagggtgtcttccgagggctcggcggccgccgcaggtgcaggcgcctccccaccgccctcggggagcagccccccgagcttgggcacgccgccccccgcggggcccaggagcagcctgcggtccgaagccagaggagcgtcgcccgcctccgcagcggtgccttcgcccgccgtctcgggccctgcgcctggccccgcggcccaggcctgcgctgggggcgcgcccgggccctgcaggtcgtgcgtcagcttgtgccgctccagcagcgcgggcgcgttgaagtcgcgctcgcagcgcgggcacttgaagggcttcacgtcggtgtgcgccgcccagtgggccgccagctcgcggccgtggtcgaagcgccgcgcgcaggcgccgcacgcaaatgggggcaaggaggccgcggccgcagctgccgcctctgccagcccccagctgcccagacccgcgcctgccccctcggggccctctccgccgccggcccctgagcccccgcacaccgagcagggccccacattgcagcagacggagcagggcgcactcaaggcgggcaggccagggccgggctgcaggggagaggggagaaccccacggtgctggcgcttgaggtggcggcccaggctggagcgtgaggagaagcggagctcgcagaccaggcagcagtagggtttctcaccagtgtggacgacctaggggtgcgggaggaagggcacaacgtcagggctgagaacctagcccggacaacggattcctggactcccagagggttgtggcacaagctctctgtcacacctacagggccatgatctagggaaacgctcgtcctatcactctctgtttggggtcacggtagattctttcggtccttaaaaaggccatgtcctggctggccatggtggctcacgcctgtaatcccagcactctgggattgcataagcctaggtgtttgagaccagcccaggcaacacagggaaaccttgtctctacaaataattttaaaaactagctggacacggcacactcctgtggtcccagctacctgggaggctgagccaagaagtttgaggctgcagtaagccgtgaccatgccaccacattacagcctgcatgacagggtgagactgtgtctcaaaaaaaacaaaaaaacacgactgggtgcggtggctcacgtgtgtaatcccagcactttgggaggctgaagtgggtggatcatttgaggtcaagagttcgagaccaacctgatcaacatggtgaaaccctgcctttactaaaaatacaaaaattacccgggcctggtggcgggtagtcccagggacctgtagtcccagccactcaggaggctgaggtagaagaatcacttgaacccggga[233 bp omitted]gtggcgggcgcctgtagtcccagctactcaggaggctgaggcgggagaatggcatgaac[149 bp omitted]tgacacagcagccagccctagcagggtgtgtcttctcccttgtcaagccctgctatcccgagccagttatcatgagctgaatacaggccttaggtgtgttagggcagagaagtgattttgaaccgaatccggctactgctcagagtttctcccactgaacgcttttcacacatacagatccagggaatcacttccaagtctagggaatcgaatctcccaggagggagtccaggaatctgtatttttttctgaggcattgccaggcttgtagactgtgtaaaaccgtgccttagagaggttttttgtattgatatttgtccttgttgatttaagattttggaataacagagagagatttgtgagtatggtaatgtcttcctggaggcctgtgaggagaagggtgaggctggatgagaaagagtgcagtgcttgattagtaatgtctgccaggggcacagatctgaagaaggaacagggagtgatgttcatttgcctttctggctccagactcgatgcacctgctgtacagtgtgggtgtagggatctctatcctctttgtcactaaatttattctctctctactcttttaacacaacaagattatgctggtcccagggcccttgtacatgctgttctcactgcctggaatgcccgtaggtctatttatctgtcagctccttggaaacccttcccggaatctggccccctggctcatcagtgatcctcttccaccctccttctttaaagcctatggctcatagcacacttagtgtctacatataacttgagtgttgtctgtctccccaccagctaaggacgataaaaatagtgaccacattggttttgctcacagctgtatttccagggtccggcactctccagacttctcctgagccacactttctgcttctccatgctccagtcacattggccttcctccagttcctccaaagcctgctttgcttccttgaaagtacacattttgttccctggatccggaaagcctcggaccccagaggcagatcattcctcacctttttctcgggaaaaccatccctgaccccatccccgatccagactgcttcagctctctcttgcattagcctcagaatatggttatcctccatcctcagatgtctcggctgcagcctaacattgattaacctagttgttcagttcacatctcccacatttgactcgaggccatacaaagggtggactgtatctgttttgttcccttagctattttttttcccccagagagcctagcactgtatctaaatacagtaggtgctcctgaaatggttcagttgaatcacaacctactggtgggtgggggtgaggcccctcaggggactgtcaattgttgcatcaagctaaggagctcccctttcatcctaaggatcaagggatttaagcaggggtcacctggtcactctgtgatagatgcagagactggatgtgagggagagagacaggaaggagggagaccactgagaaagccggggccaacattcaggatgtgaagtcctgaaccaaggcagatgcatggggacagagaggacagccaagtgtgaaagaccatcggtagatgcctggttttcttcaccctggttgtgcaagtgtctggcacatagacagagtgtgacctagcccgtcccatctttcaccttacctccttccaccccaaccccacagtctcccatcgcttcctggaacacagcacactccttccttcctcagggcctttgcacttgctgttcctgctgcctggaatgctcttcccagggaggattcctcacactgcaggttggctcaggtatcacctgccctaaccttccccacctgtctgaagtagcccatagctctcctctctttactctcacacattgatttgtattttttgtttgtttgtttgtttggagactgagtctcgctctgtcgcccaggttagagtgcaatggtgcaatctcacctcactgcaacctctgcctcccgggtccaggcgattctcctgcctcagcctcccaagtagctgggattacaggtgcatgccaacacgcctggctaatttttgtatttttagtagagacagagttt[131 bp omitted]cctatctttttccagaacattcttgccagcatacttgctttcttgcttcttgtctacttggctactgaccacctccaaaagaaagtaagttttctgaaggcatggaatttgcttttgccttggcaacacagccgtttggtgcagggaaagctgatagtcaatgaataaaggaattaagtatataactgataatcaatgaataaaggaattaagtatacacctgataaacctaagtcttaaaacggtaaggaaggaaaggataaacactagattgcagatgctggtgcgtgcacgcggggtattggcagggagatggggcgggcaggagcctatagatggggaaatttactatgaatgttccagttcgtgggttgctggtgactgaatgagaaatagcgcatgctttcaagggtcagggtgctttggtagggagggagggacattttctaatgggaggaggcgggcgcctaggccttgggccagcttccttttgcccagagtacagtggggcgcgggatcccaccgtagtcctgaccagggaggccagcctagggccggcctgtgggactcacctggtggtgcagcaggccggtggagtcgcggaaccccttggggcaggcagagcagcggtagggccgctccccggtgtgcgagcgcaggtggttggctaggttgaagctgtgcttgaaacccttgccgcagcgcggacatgcgtggggcttgagcgctgtgtgccgggcaaagtggcgccgcaggtctgagcggtagcggaagctcttgccacattcactgcagtgaaacgggaccctgggggcggcagcggcgggcggtgctggtgcaggggttggggcggggacgtcatccatggtggcggggaatacagtggtatgtgggggctctctctggagtagtggggagacagaggagcaggtgagggggtcggctccccatcagctctctcctcccaggttcccagacccaccacctgtcccctgggagaccctcccactgcccacctctctaagccactctcattgttctttaaaatcctcctactctcttagaaacccttctctcgcggctccacgcctgtggcaaaatcttcctaatcacttcatagtctcctcactccacggagtgtttttaagcctctcctcgctcttcgccaatgcgcggccactgctctctgtgcccctcccactgtaatttaagcctctcccactcttccttaagtcccacctactcccttcaaagtcccccacaatgttccctaaggatcttgtattctttgccaagcccttttccttccaaaaggccctcccactcccctctaagctcctcccactcctcttccaggatgaccacttagcgaatgggagggcaaagatttggggctaagcacactggagtcatccttgcagggagaccagaattactcctgtaacatcagataataaaaattcttcatctgtaaaatgggaatagtagtacctacctcatggagtggtggcgagaattaagtaaaattgtggcaataaatgctacgtgcccacttaagctggtgcacagcaaagacgcaacaagtaagctgtttggatgactattatcccgtaagttcctcctggattcctccttaagtcctaccatgattgctaagttatttgacttatctaagcccctctcgggtccactaagacccacttccaaaactccacccaatttttcctttaaagaagccacatcctttctaagactctccactggactcccgtcaccttctcaggccttctctacgaagtctattcccatcccctgcaagtcctttccacattcattataaagacctgatagttgcattaaacccctccaaattacacccttaaactccacccccctcactaggcctacctacttctctaagccacaccccagacaaactccatcccttctactctaaactcctccctcctgcttcctgggctccctttacccaaccagcctcaatgagtttccttccacccctcaatccagggcctacccaccattccttctgagccacgcccctttatcaaaccccacctctttgcctaagaccctcccattttctatccagactctccctcctccacgcccctcccacttccactctaagctccgcccaactcaggctcctcccagcccttgctccgccccagcagccactaggccccgcctcctcctccaccccgcagcctgaggagcgggcccccccacttgcccagtctgctccaggccccaggccccgagagccggccttttgtgcccctccccctgcccctaaaaggtgcagccctgggcgcccggttggggggcaggtcgggcaggccccggggccaggcgagtccacctcgctcgtacggagcgttggtcctggagacccggggcggccccgggaggccggggaagtccgtcggctttcctctttaattacttacacctccctctgggcgccgacattttgggcagcgggggcagcgtcacttccacccggggggcccctcgacttccgcctcagctcccttcccccgccgtactccccctttctcccgccctcttggctccccttcctcatccccgcccttctccctctttccctttcctttcccagccctggaggttgaagaagccaggcccgcgccatcttgggtgagggcagcgggaaggggcggggcttagggacacccacggcgccatacagactaagggcaaggagctgagagcgagggggcttctccgtggcgacactaggcgatgctaacgtaaatgagagcagatactatttctttttcacagcctcggactcctccgattaggatgtacagttggactagggaaaaaaaaagaaagcgaagtgcgccaactgcaatacagagctggaaaagaccggcaccatcttatccacttagcactccatgggcttcgaagcctgtccggtgccatgttaattacgggcactgggcagccattttcccgctcctcatcattcggtatctgtctttgggtcacccgactgtgggctttgtgagaggaaaggcgtttcgaggtggttggggatgtggtgctgggttatttcccactggggacacaccagggccgccggtgcgcaggcgcggcttccgggcgtggccgcgaccggtcgttaggacccagcgagtcccctttgtttcccgcgggcgcgcaggcgggcgggaagggcaggaagggaggggcccggcgcttctccgaggggcggggccggcaccgcgcgccgccgcccccgcctcgccgccgccgaggggcagggccccctcaccccctccccttcccacgcgccggccccgttgcccccgcgcgcgcgcacactcgcgagccccggcgacatgcaaatgaggtacccgagaggcggggggcgcaggcgggagggggggtgtgggggtaggggaggccgggccgcgcgctcccggagcgcgcctccaacacctgttcctgctcccgcgctcgcgccccgcgaagccgtccgggcgcgcgcgcgcagacccccttcctggcagcccccgccgcccgcttacccggcgccgctcattggccgtcgcccccgcagggcccgccccgcgcttgggcttcgcagctcgggggccgatgggcgcgtcagtaccggggcgaggggacggggagggtcgggggaccagtctccccctttccaccgttccaaagaccagactcctagactaggctaccccgtgggagcgaaccgtatggaaaggtggttgctcctctctggacagcagtctatgtggctgttaaaggggaggggggggtgcaggggggcacctgcagcacctgcttccagctgcacctgtgcctccccttcccctccgttacaccccaatcccatgctcccagtatctgagtgggcgccgggaagatggtggtggcgttggtgaagtttattgagtgcttactgtgcaccaggcagtgttcgaggggcattttaaagcccactgtcttattcgattctcctgacaaccctggtttattcacttttcagaggaggaaactggcaaagtcaattgctagttataggcagagctgaattcaaacccaggactgagccctcgtaatgtcccctttcctccttgggtttatttgttctccattctctgggacattcgggtcacaagacctgtttccagttttggccctgccatttactggcagaggaacttaggcaactgacttggctttcctgtgcctcagtttccccatctgcaaaatgggacagatatgccctattcagagggttgatgtgaggcttagctgctcctgataacaatggctaatgtgtcctgaaagcttctgtgtatgaacactttgtgggtattatgctcatggcatgtctgggcaagtacgtagaactatgtgtcccattttgcaaaagtcttgattaaggcttagagaagcgaacaccttgcccaaggccacgcagagagtaaagatttgaacgaatgatgtcttgactccagggcccaggctcttaacatcgcagatatgtttcctcatccaggaatcagggtcaaatatcacctgggaccagtcccttttttccactctggaaccccttccccacttctgccagtcagcagggagggatgagagcattcgtgaggcctctatggctctggagtttgatgggctctccgtttcaaggatcacaatactggtctgcactctcagttggactctatcctctctggaaggtttttttttgtggggaggtggggaggggtgttgctcatgttgatcttgaacttctagatccagaaggagagttagggaggcatagggatgtctggtggagctcagggaagtgcctgtttatcagctgatacaagatcatctcactgttttacccaccagcatagctaaaattgtgtatctggatgaatgtcaaacacacctttgtcaagagacttggagagagggatgggcgaggtgttgggggacacaggggtgctctagaccctgtgagcactgactctgcccctctctcctcttagctggctccagtgcccagacccaagccccccactgctcaatggacacccccagcccagacccgttgccttcgcctttgcccggggaggaagagaaacctctggccttatctcctcctgttccccggggccgccgaggccgtcgtcctgggggagccacctcctcaaatcggacactcaaggcctccctccctcgcaagcggggccgcccccccaagtcagggcaggagcccccactggtgcaggtgcagggggtgacagccccagtaggcagcagtggcgggagcgacctcctcctgatcgatgatcagggtgtgccctatacggtctctgaaggttcagcggctgggcctgagggctctggccccaggaaggccccacacttctgcccggtgtgcctgcgggccttcccctacctctccgacctggagcgccacagcatctcgcactcagagctgaagccgcaccagtgcaaggtttgcggcaagaccttcaagcgctccagccacctgcggcggcactgcaacatccatgccggcctgcggcccttccgctgcccgctgtgcccccgccgcttccgcgaggcgggcgagctggcgcaccaccaccgcgtgcactcgggggagcgcccgtaccagtgccccatctgccggctgcgctttacagaggccaacacgctccggcgccatgcgaagcgcaagcacccggaggccatgggggtacccctgtgtgcaccagatccagggtctgaaccgccgtgggacgaggagggcatcccggccacagcaggggccgaggaggaggaggagacagaggggaaaggggagccggcctgacccacacccccggccatcgctccctgggccaggtttagagcagggagtttggctggtgctgggcctgagccagggggccgggacacccttgtttccggtggtcttcccgttgtgggagcaggtggagggtggagacctaaactttggggtccagctgccttcagcccccctcccccagactaacagacccttggaggcaggggctgtggaaataaatctctgcctgctggctgcctgtgtgtgttccgtgccgggatgccatcctctcctgccttcaaatgttcttcctcggctacaccgtcctgtcgggagtgcggggaattggagaggaccccacttcctgtgcctcatgagcgtggtgctcgccaaagaatggttttggggggaaccttggccccttccccatctccatcagaccccaaagtccatgggtccctcggagtccgcggggaattggttccacgaacctcgcagataccaagatctgggcatacacaagtccagcagtgggccctgcggaacccgcggatgtaggaaaatccgcccttcgtatactgtatgttccaccggtgtttgggtgaaaaaacgtccgcctctcaatggacctgcagttcaaacccctgttgttcaagggtcagctgtattcccagtacacatccaatctaactaaaaacattgaaccttccatgcagacctgactgtaggtccgaccgcctctctcctagccaattcccagaaattctgcagccactttgccccacctccttgtcctgaggacctactgtttggaaggaaaaattaagacaaaggtatgagcaggacggtctgggtaaggtttagagataaggggtgtggattggggcggggctaaggagcgaggggtggggctgagattgcggggcagttaggctgggacctggggcgggggcttagaagagggttagagttgggtggggcttaaagaggtttaggggttggtccgcagaaagtgagagcggtttaaagaggatggatagagttgatctaatagagagtaggggcttggagctggggaagaacaggaggaactgcgtgagagtggggcaaggaggacggataattttttttttgagacagggtctcgctctgtcatccaggctggagtgcagtggccctatcaccgctcactgcagcctcgacctgccaggctcaagcgaccctcctgcttcagcctccggagtagctgagactacagacgggcgccagcatatttagctaattttttttttttgagacggagtcttgctgtcgtccaggctggagtgcagtggggcaatctggctcactgcaacctctgcctcccgggttcaagcagttctctccctcagcctcccgagtagctggaattacaggcgcccgccaccacgcctggctaatttttg[167 bp omitted]at[138 bp omitted]attcagctctgaggtgggcgtggttcagggccgagggccgggggccggggcttaaaggagaaactctgagggaacagggtattggaggtgggacttagaaggtgctgatgggggcgcacgactgctatggaggcgatggggagagaaggaagtacttaatctaagggaagttcctgggagagtggaagcttagcaggaggggctgaatgggtctgggtttggctgtttgggatggggctgagttgggagccgggattatagcgattatatgagcgggcagtgtcaagtgtggtaaatccatggctcttgaccagcatgcagcagaatcagagtatttcaaaacacggatccctagacccccaaccccagggcttctattccgcatggtctgagcaggcagccggatgctgctggcctcccaactatccttgacaaccaccgatttaaaagaatgctttagaggtgggaggcactcaaaagtcacgaggtgcaacttaaatgctatggggtgaaggggcggggcttggatggagggggcggggcctagggaggggtgaagttccagagagtgggagcttggagagggggaagaacaggagaaactgcatgagggcgaggggacgaagacagactttgaggcagtagggggcttataatcacgctgtgagatgggcgtggttcagggccagggggcggggcttcagtgtgagacccgagccggaggtgtggcttaaccggacgcccagagcgtgtcgcggggttcccgtagaagaggcgggcattcaaagcgcaggcgcacctggctcagttcgcccaccggaatcggcccgggctttcactgctcgcgtccccgagtcagtgcgcaagcgcatttcccccctcctggtccccgccaccgcctcctctttccgatcctccacgccggcgcctcgggaacgggcgcgacttccgcttccgggcgggcgggcaggcgggcggtgcggggctgccggggaggggggagggggcggcacttccggtcgggccctcgggtctccccggagcggcggcgcctcctccgcctcctcggcctcctcccggcggagaccccggcgccggtgagtgacggggtgcgtggcccgggggcccgggtgcagcgggggcggggggccccgccctggcccgctgtggtccccagaacgtcccccaacccctagcaagtcagtgcagctcccgccgggcccttgccaagggacccccaatcactgctccccggtaggatcactgcagatagctcccccatgaacgcccccagctaggatggctgccaaagcgctttcattcgtggcgatcccctaaacggctgccagggcccccaaatgatacctcctcgtaggatcccctccacatagcgctccccgtcattgcttcctccaggtcagcctccagatgccatcagcattgcccctccccatgtagggcagctgctcgtgaaccctcttattagtatcctctatataattctccccagagtgtttccttagtgccttgcagcagaactgtcccccgttatctctgtccatacagcaacagcccccaatggccctgaccacctccctccccagcagaacgccccttcgtgggtgtgaaaatactttctattctggtcagcaccaagaatgcctttttcccttctgcaggtcctccagtgattccccttaagaatgcccctttcaaagccacccccccatcgcagcggcacagctccctctagagttccttcacactcacatcctctcccgcctcaggtagaaatatccgcctgcttagctccaggctcccatgacatactcccgtacctcctctcaccccaccctcatcgcggtcagcccgtcttcattacttctgccacagaacagtgtcccgcagtgaggcggtgaagccttccttcccagaatgtgcctcatcctcttcctatggcgtgaacaactgttgccctgacctgcagcttctcacccagctctcaggctatcgtcctggactccctagggaagaccctggacttcactagggtgtgacttcttttctcgtaggcattccttctgcgttgaacgcatattcactattctagctgaagggtataatatacagccacgaagggggtcgatacacacagtgttctcactgtgcggggtctcacagtctagttgatcagacacgagtcgacaaagatacacggggttttgtgggttctctgagagcctgatgaactactttagaggtgaaagctgaattacaagtggcagcttagccatgcaaagatctgggtgagcaggcagcaagaacaacaagtgcaaaggccctgaagtggcggtgagcacggtgagtggaggagcagcaggggaggccggtgagggtggagtggaagatttgaaggcaagaacaagaggaaggaagctttggtctcaaaaggctttggaggtgagggcactgggataaattatctagcctttgtcagctctaccgagcccagaatgttcttcattcattcatacgttcattcgtaaacactggttgaacaactgtttaatgagcacctactttacattgggggtacaacagagaacaaaatagacaagaatccctgtcctcatggagtggatatgctagttgagggggcagatgattaaaagacaaaatacaggccaggcgaggtggctcatgcctgtaatcccagcagttgggaaggccaaagtgggaggatcgctggaggccaggagttcaagaccaacctcggcaacatagtgagaccctgtctttacaggaaaaaaaaaaaaaaaaaaaaaaagctgggtgtggttggtgggcacctgtagtccccagctattcaggaggctgaggtgggagggctgcttgagcccaggagttcgaggctgcagtgaaaaaaaataaaaacaaaaaccaagagtatatgtgcgtgttcagaatatcacgggataaagagatagacctggggggctgtggttcaggatggcctcccccaggattttcctatgtcttgtcatcttgtccctcccaaaagccacacaccaaaaagttatacaagagtaaaaattccccttctcctggacaactgtggcccacttgggggctgctcttaacagcgccctaaccccaggagcgaagtgattgggaggatgagccctggattccactagggttcacagctttgagcaaatcactccctcctttcctagcctcattcattcacttcttcaaacaaaaatgtatcaagccaggaactgttgtaggtcctggggatggaacagtgagcaagagataaaaatccttgccttcaggaagccgatcatctggatggggagaccaacaaaatcaaggcaaagaagtagattatgtgaggttataaatgatgctgagcagtaaggagagaaatgaagcagggttagggagatgaggatgtgggcctgggtgacaggtcattggttactgagaggctcattgagaagacagttgaccaaagatggggaggaggtgaaggggtgagcgagatggttgcctgagagtcagaatattacaggcaacagcaacagccagcgcaaaggccctgcagcaggaatagagtgggcacatgggaagagcagccaggagactgtggaggtcattgtaaggactgtggctttttttttttttttttttgaaaaggagtttcgctcttgttgcccaggctggagtgcagtggtgtgatcttagctcgctgcaacctccgcctcccgggttcaagtgattctcctgcctcagcctcccgagtagctgggattacaggcatgtgccaccacgcccagctaattttgtatttttagtagagatggggtttctccatgttggtcaggctggtctcaaactcccgacctcaggtgatccgcctgccttggcctccaaaaatgctgggattacaggcgtgagccaccgtgcccagtcaggactgtggcttttgaatgagatggggttactgtttggtttgggaccgaggatagacatgctttggttatagtcctcctgtcagtaaaatgggaataataataacacatttgttgtgaagtttgaatgaaacaagccacataaggcacctaagtacaatgcttgttagaggtcaacaaatgttggtgacttgttctggtcttgggtcaagccaagagacttgggatttgttggcagggagatgggtggagcaatgcatgtttccagtatgaagtgggattgggggcgggggtcctccttcattttggagggagaaataccgaaagacagcatgtgatgggactctggagccttgctgcctttcttcaaccactggccctgccactagttaacaatgtgactttagaagtttgtttgtttgtttttgagaaacagagtctcactctgtcacccaggctggagtgcagtggcgtgagctcactgcaacctctgtgtcctgggttcaagcaattatcctgcctcagcttccccactagctggaactacaggtgtgcaccaccacacccggctaatttttttatttttagtagagacggggtttcactatatattggccaggctagtctcgaactcctgactatagttgatccacccacctcggcctcccaaagtgctggcattacaggcatgagccaccatgcctggcctgactttggaagtttaatttatctctctggccctcagtctcttcctttgtatttcagagtcaatgcttgtaaccatcttctagggttactgggaggattcgttgagctcacacacatcagagttacaagagtgctgggctggtagaaagcacacatccagtgttatatgcgcacgttactctttattaacaaaccagaatttcatcacaaggcagcgttgttgcagcagaacggcccacagtctggcatcagaaagacctggaatcagttacctgctttcctctttattggccacatgaccttggaggaatgccttccccatgctgctcctcagtttccccacttataagatgggcccagtcatggtacaggactgtgctgcctccaggcaataacaaatatcaaactggtcaaacaataaatgtgaaccgttaatacacttgctgtgggactcctgtcccttggtggtggtggtggaggggtgggtccctccccatcatgcttctctctgcataaaaccctcctatgacatcccctcttaaaaagataccagtttaggcttgagttgtatgaaagagggaatgtttctggtttcctagtggagattatcataagcctgatcaattctgtccaccactgatgtatccccttcagcatctccacaccctgccctcagtgccctcctcataacatcactgtccccagaattgcttctcccaggaattcctgggatcatttagctccatttctgctacatgtccccctccgttcctctgggagtttgatcagcttagtctcatcgctttgttcattccacaaataccaagatagacattcacagctgtgcatttccctctgagcattgctttggctgcacctcctcagctttggtatgttgtgttttcattttcattaattgctaagcagtttttttgctttttgtttgtttgtgtttttgagatggagtcgcgctcttgttgcccaggctggagtgcagtggcacgatctcagctcactgcaacctccacctcccgagttcaagcgattctcctgcctcagcctcccaagtagctgggattacaggcgcccaccaccaagcctggctaatttttgtatttttagtagagacggggtttcgccatgtaggccagactggtgtcgaactcctaacctcaggtgatcctcctgccttggcctcccaaagtgccgggattacaggtgtgggccaccgcacctggccagcattttctaatgtatgatttctttgtggacccattggtaatttaggaaggtggtgtttccttttcacataccagcagatatttgtcaagcacccacactgggccagtgctacgctaagtgctggggtcacaggggcgagcaagacaggccaagtccttgctttcctagagaggggccaaacagtaaacacacagaaaaggaatgacatgagttggtggcaataactataatgaaacacctgcggctggatgagggactggagagtgatggggtggggagtgctgagtagagacccaaggaggctccagagggagtcttgttgaaatctggcgaagaacactgtaggcagaagagaaagtaaccaccaccctctcccaccaggccccttgtatagacacccctcataacccagaagacatccctaaataaagctcttatcctgatagttctcccctcacctttgttcactcggggaacagcccagtgaaacactgctgtgggggcaagggtgggaatggggttcaagcccattgatccagactcctactccgtgaccatggcaactcactttgcctctccatgccttagttttctaatttatccaacggcgggaacagctgcccctatttagagttgtggggagtcagtgaattaatatgtgtaacgtgcttagaaccgtggcgggcctctaggagatgtccagtcagtgacagctacgattaacctgtgctctagtggagacaagctagtcaggggcttctttccccaaacactcttgccctccctccccatagcgccctaaatcaccccctattccctgcatccttatggcctgtgtttgcctccctggccagtcagccccctccagagctgtctccccaacttaggttccacctacagccttccaattaccaccccagccaagcctgtcctctttccggagatcagattaaacggagggggtgtgaagggcatgggatgttgagtcttgtccaaggacaaggacacccggagctggagactaaaaatatctcactccaggatggcgtttggggtgggggtggaagagacactcacccctcacctgtgggaggagagagcagcccgatggatagaggataaagggtccaggccttggtaggaacccccttgacccccatagcgggctgggcttagagcctggcccccatcgggtagggatgatggacaggaagcgggtcagacctcatgggcccttcaccgactcaccctccgcccacttggtggaggtgcttccccaggccagcaagtagaccaagaactcggagatcagttacgggtgctgagggtctggtgtggtgtggggtacacacatggatacctgccatctggaatgaaaagtcgtgtaaaggaggtgccagagaatgatgccgggggtggagggtcaggagaagccccactaagggcaaggacatgggggggtcaggagaagccccactaagggcaaggatggaactcaagctccctgcttctgttgctaggcttagcccaggtgtgtgatgtcatggatggtacaaatagctcagggggttgaatgcattctgctgatgcatgtgtttcattatgttctgttccaaccctgttgaatctccctgcggtataggggttcccccattttaaacatggagaaagtgtggatcccagtggagatgggatttgaacccaggtctgtccaagcccagggtctgtgttttgattgtatcagaccaccttctgactatatgccagcccccttgctggaatttgtttctcccaggcaagcaaattctcctttctactgtctattaatattaaaagagtgcactccccatactgacttttttcagttctctaggcttgtcctgacttccccatttctactactagtagtaacagtgataacagtatcgtatcttcaattttttaattttagtttttagagccaaggtcttgctctgtcacccaggctggagtacagtgatgtgatcacagctcattgtagccttcacctcccgggctcaagcagctctcctgcctcagcctcccaaagtgctgggatgacagctgtcagccactgtgcccagtccataccttctatgtacggagtgcttacagagtgccaggaaccgccccctaagagccttgcacatatgtgtgtgttgaatcctcacagtcctgtgaggtaggcatgtgctttgtggtccccaggtgtagatgaggaaatggaggcacagagaggttcagtcacttgcccgtggccacacagctagaagtggcagggcttacatttgattctggccccagagtcctccctcctaattacgctgatagaaactgtgattccccttatcattatgctcattttaggataaaacctgaagggatgaggacggagggctgtgggtggggtagggtgcaggagtatggagagacagcagagggtctgagagggtttggaaagaaaactgagtccagaggcccccaggatgcttggacaattggagtctgaaaaggagagaaagtagagacggcccaggccagcgcgctggctcacatctgtaatcacccagcactttgggaggtggaggctggaggatggcgtgagtccaggagtttcagaccagcctgggcaacaaagcaaaaccccgtttctacaaataatagagggcctgcaggtggtgtggaggagagggtcccctctacaaagctgtgtcaggaccccagaaaagatggggagagatggaaggaattagagaaggaaaagaggtggggagtgggtgggagttgagaacacagagagggaaggtgaaggtgagtaggagagtcctggggccagggagccaagaggaagggctgccctttggggtggacaggcagagggactggaagcctaaatctggaaggctagggggtgatccgcacaaggatggatgagtgggcgcacagctccattcacctgcggggagacccagcgccgcggccgtgtcctcagccccgtcctcctcttcacagggtctcccgtctcccacccgccggagatggaggcgaacccagcgggcagcggcgccgggggtggcgggagcagcggcatcgggggcgaggacggggtgcacttccagagctaccccttcgacttcctggaattcctcaaccaccagcgcttcgagcccatggaactgtatggggaacacgccaaggcggtggcggccctgccctgcgcccccggccccccgccgcagcccccgccgcagccccctcccccgcagtatgactacccgccccagtccaccttcaagcccaaggcggaggtgccctcctcgtcctcgtcctcgtcctcctcctcctcctcttcgtcctcctcgtcgtcatcttcgtcctcttcctcttcccaagccaagaagcccgatccgcccctgccgcccgccttcggggcgccccctcctcccctctttgacgctgctttccccactccgcagtggggcatcgtggacctctcggggcaccagcacttgtttgggaacctgaagcgaggagggcccgcgtccgggccgggggtgacgcctgggctgggcgctcccgcgggggccccagggccgcttcctgccccctcgcagaccccgccaggaccccccgcggcggcggcctgcgaccccaccaaggacgacaagggctacttccggagactgaagtacctgatggagcggcgcttcccctgcggcgtgtgccagaagtccttcaagcagtcctcgcacctggtccagcacatgctggtgcactcgggggagaggccctacgaatgcggcgtctgcggccgcacctacaaccacgtgtccagcctcatccgccaccgccgctgccacaaggacgtgccaccggccgcggggggcccgccccagcccggcccccacctcccgccgctgggcctcccagcacccgctgccagcgccgccaccgccgccgccccctccacggtgtcctcgggccctccagccacgcccgtggcgcctgccccctccgcagacgggagcgccgcccctgctggtgttggggtgccccctcctgccaccgggggtggcgatggcccgttcgcctgcccactctgctggaaggttttcaagaagcccagtcacctccaccagcaccagatcatccacacgggcgagaagcccttctcctgctccgtgtgcagcaaaagcttcaaccgcagggagagtctgaagcgccacgtgaagacgcactcggccgacctcctgcgcctgccctgcggcatctgcgggaaggccttccgcgacgcctcctacctcctcaagcaccaggcggcccacgcgggggcgggcgccggggggcctcggcccgtgtacccctgcgacctgtgcggcaagtcctactcggctccgcagagcctgctccgccacaaggccgcccacgccccgcccgctgccgctgcggaggcgcccaaggacggggcggcctcggccccgcagcccccgcccaccttccccccgggcccgtacctcctgccccccgaccctcccaccacagacagcgagaaggcggcggcggccgcggcggcggtggtgtacggcgctgtgcccgtcccgctcctgggcgcccacccgctgctgctcggcggcgcggggaccagcggggcgggaggctcgggcgccagcgtcccaggaaagacgttctgctgcggcatctgcgggcgcggcttcgggcgccgcgagaccctgaagcgccatgagcgcatccacacgggcgagaagccccaccagtgccccgtgtgtgggaagcgcttccgcgaatccttccacttgagcaagcatcacgtggtgcacacgcgcgagcggccctacaagtgcgagctctgcggcaaggtcttcggctacccgcagagcctcacccgccaccgccaggtgcaccggctccagctgccctgcgccctggccggggcagccggcctcccctccacccaaggcacaccgggggcctgtgggcccggggcctcgggcacgtctgcagggcccaccgatgggctgagctacgcctgctcggactgcggcgagcacttcccggatctctttcacgtcatgagtcacaaggaggtccacatggcagagaagccatacggctgcgacgcctgcggcaagaccttcggcttcatcgagaacctcatgtggcacaagctggtccaccaggccgcccccgagcgcctgctcccgcccgcacccggcggcctgcagcccccggacggctccagcggcacggatgcggccagcgtgctggacaacgggctggcgggggaggtgggggcggccgtggcggcactggcaggggtgtctgggggtgaggacgcaggcggggcggcggtggcaggtgctggcgggggtgccagttccggccccgagcgcttcagctgtgccacgtgcggccagagtttcaagcacttcctgggcctcgtgactcacaagtacgtgcacctggtgcgacggaccctgggctgcggcctctgcggccagagcttcgcgggcgcctacgacttgctcctacaccgccgcagccatcggcagaagcggggtttccgctgcccggtgtgcgggaagcgcttctgggaggcggccctgctgatgcgccaccagcgctgccacacggaacagcggccgtaccgatgtggcgtgtgcggccgaggcttcctgcgctcctggtacctgcggcagcaccgcgtggtgcacactggcgagcgggccttcaagtgcggcgtgtgcgccaagcgcttcgcgcagtcgtccagcctggcagagcaccggcggctgcacgctgtggcccggccccagcgctgcagcgcctgtggcaagaccttccgctaccgctccaacctgctggagcaccagcggctgcacctgggcgagcgcgcctaccgctgtgagcactgcggcaagggcttcttctacctgagctccgtgctgcgccaccagcgcgcccatgagccgccgcggcccgagctccgctgccccgcctgcctcaaggccttcaaggatcccggctacttccgtaagcacctggctgcccaccagggcggccggcccttccgctgctcctcctgcggcgagggcttcgccaacacctacggcctcaagaaacaccgcctggcgcacaaggccgagaacctcggggggcctggagcaggggcgggcaccttggccgggaaggatgcctgaccgaggggttcccatcccactcccatcaaaagcccccttctggactcccacctcccaggactgatcagactcttcccccctcctcgctgttgccccatccttcagaacttcacacggactggcgaccttcagggcgcacgcccgacaggctcaagactgaatcactcccatcctcgacctctctgccctcccctcatcccatcagacactgaaccctatcctccgtccaaccctcgtttgtgacccgcatcagcccccgccccagcagcactctgcccccagtaagttttggcggagatgggtctgaaccgcccctccccctcctttggaatctggctggacagtggagtatgagcagagttgggagggcacaagggagtgctgggtgctttttggggtgggggggtggggggcggggtggcagacgcggcttgtacagagcggagaataataaatcttaccatgagggccgctggagtccatccttgcatcccacccagggagagtggggatcacatggtggcaaagcacaaagttaaaacttgtttcctctgcagttttgatgccgggcgcctctgtctctcactcactctcattcaacagggacttactgaggatttgctgtattcccagcgttagtctgagctgggcaaatggagatggacaagacaggtaagtgtctgctctcaggaactgacttaacatgccccgactcttccccttccggatgctttcagcctttgttcactccaccaccacttccggagacctcctgcctgccaggccctgagctgggcactggggaaacagatgaattggacgtgccccttggcctcaagtaacacaaaagagaactcccatccggctgccgtggctgcctcacaaccatgtgcagactgatggtcatgatacagctccctcttagcacttgtcctccagggtaatgattgggagattcaaaagcccgttcacagctctcatgttggctctgggaacagcaagatgtatgcctggcaatgtgtgtttagttatctcatttgttagaagaagggcctggggtcctgaagaacaaaggtgctccag[140 bp omitted]accccatctctactaagaatacaaaacttagctggacatggtggtgggcatctgtaatcccagctactcaggaggctgaggcaggagaatcacttgaactcaggaggcagagattgcagtgagctgagatcgcaccactgcatccagcctgggtgacagagtgagactccatctcaacaaataaataatttggacttcagtcccagagtacttcagtacagaaacttgaagatgaggccaggtgcagtggctcatgcctgtaatcccagtactttgggagcccaaggcgagcagatcacctgaggtcaggagttcgagaccagtctggccaacatggtgaaccatcctttctactaaaagtacaaaaattagctgggcgtgatggcaggtgcctgtaatcccagctactcgggaggctgaggcaggagaatcacttgaacccaggaggtggaggttgcagtgagctgagattgcgccactgcactccggcctaggcgacaagagcgagattccatctcaaaaaaaaaaaaaaaaaaaaaaaaggaaaaaaagaaacttgaagatgaaactaggtaagagcgctgcttgggtgagtcctgtgtgacccatgggagagcagctaccctgtgtggctccatgttctaatgctgaagacccagcatgagacagacgttgtgccagtgcccccagggttcagggttcagcagtaacatggaaatggagcctcacagtgtaagggacttggaagtatcactagggcttgagggagcacagaggagtcacctgtcagagtggaaggggggctagaaaagcttcttggggagaaggtgatccctgaacgatgacataaaccaactggagttttccaggtaaagaagtggcaaagaggccgggcacggtggctcatgcctgtaatcctagcactttgggaggccgaggcaggtggatcacgaggtcaggagctccagaccatcctggctaacacggtgaaaccctgtctctactaaaaatacaaaaaatcagccgggtgtggtggtgggagcaggtggcaggcgcctgtagtcccagctacacgggaggctgaggcaggagaatggcatgaacccagaaggcggagcttgcagtgagccgagatcatgccactgcactccatcctgggcgacagagcaaggctctgtctcaaaaaaataaataaataagaaaaaaaaaaaaaaaaagaagtggcaaagatttccaggcggagagtttagtgtgttgaactaaaccctgctattctggagcatttaagacagattagtatggctggaggttgggttcctgggggctaaaccctgaagggtcttgaattccaaactgtggggcttgggtgattttataggctagaggctggaaactggcagctgcaaggccgaatatgaccactaacacatttttgtttagtctgtgcattttttaaaaagtttgacttgactgccaacattgggaaatcaaaagattttacataatgtgaactaatggaacttctgaaagaaactggaagatgtggcaacccaatctgtgttccggagctgagcagccattaccctcttctgaagaggcactctccaatttgttgaataccaattctgagacctggtggcaatcgccattatttcatgttgctgatattttccccttgaacctggccgtcttgctcgtgtatttacattttcacccagctcctgtaggcattcacatttccaaatcgtctcaaagccacaaggagctgtgtcttggtgacaaggatctgcatggatgccatatggagaatgaagagggcaggtggccgggtgcagtggctcacgcctgtaatcccaacactttgggaggccgaggcgagtagatcacctgaggtaaggaatttgagaccagcctggccaacatgatgaaaccccatctctactaaaaatacaaaaatgaactgagcgtgatggcgcccacctgtaatcctagctactcaggaggctgaggcagaagtgcttgaatccaggaggcagaggttgcagtgagcagagattgtgccattggactccagcctgggcaacaagagcaaaactccatctcaaaaaaaaaaaaaaaaaaaaaaaaaaaaaaaaaaaaaaaaaaaaatgcaggcactggactgctgtgcagttgtctgtgtgtgagaccactgttggtctacaagtgtagtgatgccgaaaacacgttccagttccaaagatattaactggctcaactgagggaaactgataagggactggacataagaatgaggatgaagaaggtttaaacctgcccaggtatccagcttgggtggtggtgccaatgacatcagaagcatggaggtttctttgaggaaaatggaatgagttctgttcacattgtgagttgcctgtgagttatctcatggggcccactgggtgaacagaaaggtgtgcaaatcagaggctctcactcaacaagcatgcaaagcatgttgagtgtgcttttgccaaacttccctgacccccctctcctacagctgaaccacataacacgtaaccacagtggggcctactcaccccccattctgatgatggggaaacagaagcttggaggaagagatgatgcaactgactgctggtggcaaaaccatggtgaggcccctcctcccccaactccccaaagcggacaatccgaatacaagaccgacagagaagcccttcagaaggtcctttaataggaacagaactgaaggtgtcacacctccagctcccaagtcctcctctcgcccccaccacagtgactctttcactccacacccaggccagcccaccatgctgccatcagccagcccgcccttgggattggcggggactaggcagtaagctgtttgcttcgaactgggagtggaggaaattagagaaacctgaggctaccttgaggcttgtgggggaccctgggctctgagtctaaagctttaggagggggatgctaggtagctgcttgctttatgtgttctcagttgcctccgaagaagagtggatgggttaaggacggaccacaatgggggtgggggttgccgctgttggagtcaagatcctatggtcaggcttacatccttgaggctcaagtgctctcagcggtgacttggggaccctctggctttgaggtgatgggatcccagagtctcttcacagataacctggtgagtgtcttctgccagagggtggataggcatcccaggtccagtgcaatgcagtgaggtaggcaggagactccatcctggtccacccgtggaggaccagagcagaagactatggtggaccccaattccccccttccattcgatcctggctcctcctctgaagtgcccaggctctgtcgtgacaggctgggtcttgcacaaggacaagccaaccaagagacagtcggggaagtgacatccagcccgtgggccttgcctttggccgcacacccgcagagctgcaagagctgcacctgtcctctcctaggcctggcagaggtgctgtgtgggcgtgtgggagtctggagcctggccctctccctctgctctccatcactagcggctcacaaccatccctgcagctgtcatctctcccccaatctcccctcttctgtcccctgcctccgtttccccaccccgtccccctccccgggtcggcctcgtacctccgccttaactaacccatgtccctggtctgcagcctactggtcggcctccaccttcaccttcgcggtctccccccgcccctcctccgcagggtcccctaccccacacccgctccccgacccctcagccgccgacgagcccagctggcctccagagtctcccagccccggccccggcccgtggaagtgggtgcgctggtgcttgcggaagttggaggagttgttgaaggtgcggtcgcagagcgtgcagcggaacgggcgctcgccagtgtggatgcgggcgtggccgctaagcaccgaggactgggtgaagcccttgccgcagatgccgcaatggtatggccgctcgccagtgtgcacgcgctcgtggtctcgcatgtctgaggagcggcggaagggcttggcgcagaacctgcaggcaaaaggcttccccaccgctgcgcccgccgccgccgccgccatcaccacctccgccctctccggggccaccccgggcctctgttctgcaacggccgctgtgtccggaggcctccgagaggtgcccggctccaccccgtgccggtgctggtgccggagcaggggcgccaaggccttgaaggcgcgggggcagagcgcgcagcggtagggccgctcccccgtgtgcaagctgtagtgcgcgcgcaggctggcggggcccgggcagctgtggccgcacacgtggcaccggctcgggtccccaccctgcccgcctccctcggccccagccaagtggccatgttcgtggaacagcagctcggaaaccagccggaaggcagcagggcacaaggcacagtggaaagaacctggctccgggggctcagggaccagcgtggtgtccgtcaccttcaccacctggatctcgatgaggtcactcgggggtgtgccaggccggcagtcatcaggcaccaggacctgggcaagaggagaagaaagaggagcctgtggaacctgcctcaggaccgccccagcacgccccaattattaaagcttgggctcctctgttattttcagacagggcctcactctgttgccctggcgcgatcgtggctcattgcaaccttgacctcctgggctcaagcgatcctcccacttcatctccctgagtagctgggattacaggcatgcaccaccacatccagctagttaaaaaaaaattatttctggctgggcacggtggctcaggcctgtaataccagcacattgggaggctgaggtaggcagatcacctgaggtcaggagttcgaaaccagcctggccaacatggcaaataccgtttctactaaaaatgcaaaaattagccaggtgttgtggctgctgcctgtaatcccagctactcgggagactaagacacgagaatcgcttgaacccaggaggtggaggttgcagtgagatgtgatcatgccactgccctccagctcaggcgacagaacaagactccatcttagacagcaaaacaaacaaaaattattattattatttttaatgtagagggagtcccactatgttgcccaggctggtctccaactactgggctcaagagatccttctggctctgcctcctaaagtgctgggattgcaggcgtgagccgccgcgcccggcccatcctccaggattctgttgtatcctcatcaacatttcctctcctgtccaaaatatatcatggatcccaccttttgtcctccaccctagttaaagccccatcacttggcgcctccaaaattgaaaaacccaagggcatctctgttcctatttctgctggcttgtaacccacctcccaggaatagcctgaaggtcttttgaaaatgtaaatcagatcaagtcatttttcgcactcaaaaccctccagtggctccaaatgacttatcccaaatcgtcactataatatctgtggcgatgtagctccacttatctctctgaccccagcttaaacataagccggcacccagctgacttctctcgtctaaatttagctgccccacccctactcttggctcaatttatagaaattggctcaatttttatttcctttatagaacatatcacagtaactctcctttattgtctctctcctctcaagagactgcaggctccaaaagaacacaacccttgtctgtcttggtcacttctctatttacagagccgaagtaggagctcagtaaatgtttgttgaatgaatgaatgtcctcaattagtctaattctgagtggggtaacgtggaggaagttccaaagtcacctagaccacccacttctacccccaaattctcccttgggcattcgagaagcatcactaagacccttgaagaattatcccctaccccgacataggtgctccaatcataatcccccacgtttttcagggtcaccttcccaaccttctaccctagaattagccctagaatttatgaggccccgccccttacaaggctccacccaaattatgcaaattatccctggtaagcccccttccctggacccaaacccgtcccacaagacaacaccgtcctcagactccgcccccatccaggccccgcccaccacccataggtccctcccccaccccgcccaccatgacatagtctcctcccctgccccgcccctcgcgaaaccacaagaagccccacccccagggccatagcactaaatacctccctcgcccaccccctcataggccacgccccggacccgccccccacactacgacctcctcccacctcgagccccacgcccaggccccttccttgcccgcaccaggtccagtggctcctgggatcgcgactccggagtcggtgagctccgactctgggcctctgggcgcgcagcggccatcttgtgcccaagccccgcccccaaggccaatgttcgctctgaaagggggtggggctcgaactggcgtaagagctactgcgcaggcgcagtgcggggctgcgagggggcgtggtgcagcagggggcgtggcggggcggggcgtggcggctgagcccgggagaatgtgagttgttccctctctaattacctgtctgtccctccgagggtacgctctgtgtggcgctaggatgcctgtaacaccctgggaacaaatccgaacgttccttctaaaccaacgcaggccgactcgaggctctggctgtcaggggaacctcagcagaactgaagaagctttgctttgtttccacggtaaacgtttttgtgattacctctgcactgctcatgacaacgtaatgacgccaagtttataaacgtcggtgtaggccgggtgcggtggctcatgcctgtattctcagctactcgggaggctgaggtgggaggatcgcttgaggccgggaggtcgaggctgcagtgagccatgatctcgccactgcatgcagcctgagtgacagagactctgtcaaaaaaaaaaaaaaaaaaggcagtgtggagaaaaatattcagtaaacagcaacacaggtggtcctgggaggacgcaaaaacccgcaagctgatgttatgtttgggaggaaagagctcaaaaacgcggggttttcagcagcatcaaggacggggctcttcttagctgccccgtttagtcattctggtggtatcaccttggataagtcactacacttctctggaccatttctctttcttttgtgtagcactgtagaagcattgtgacaaaccactgagaagagacatggaagagtttggaaacatctttaaatagttttcttgaaagggcaggataggagatacttaaacatgatcctaagcatgatcatttcattcataaatatatatgaaattatattttgtgatatgttggtataaaataaagataaacaccacttaggctgaattatctcctcctcctcctttcttcttcttttatagagatggggatcttgctgtcttgccttgcccaggctggtcttgaactcctagccttaagcgatccttctgccttggtcttccaaagctatatttcccttcttttcttttgattttaaaataatttttttttttttgagatggagtctcactctgtcgcccaggctggagtgcagtggcatgatcatggctcactgcaacctctgcctcccgggctcaagcgattctcctgcctcagcctcttgagtagctgggattacaggtgcccgccaccatgcccggctaatttttgtatttttagtatatacagggtctca[131 bp omitted]ctaagagtatcatgggccctaggcactgtatctactactgtgtctaatgcttaagtcagctctttctgtccaggtttcctaatttgcaaaatgagggtgataataaaacctactttacacagttgctatgatgattaaagaagtcattatatataaagtattttggacaatgtatggcacacagcaggtgctatgagttagctataataattactaccatttggcactcccactagcaataaatagggacctttgttgcttaacattcctatcaatatctgatactcaaactttaaaatgttcgctaatctcttgggtgtgaaataatttcatttcttttcttttttttgagaaacagcccaggctggagtgcagtggcgtgatctcagctcactgcaacctccacctccttggttcaaacaaatttcctgcctcagcttcccaagtagctgggactacaggtgtgacacgtcattacgttatcgcaagtggtgcagaggtaaccacaaaaacctttactgtggaaacaaagcaaagcctcttcagttccgctgaggtcttccactgactgctagagcctcgagtcggcctgcgttggtttagaaggaacgttcggatttgttcccagggtgttacagcccagctgatttttgtatttttgttttgttttgttttttgtttttagtagagacagggttt[136 bp omitted]gagatcattcatagcacccagaactcatcctccagtttcccttttttgagagctggaagtatgtcatctctgtatcccctctgtacatccctatagagaaggcatgtatatggctcagtgagtgtttggtgaatgaatgagtgagaaattgaattcatgcagatagaagaactttgtaccagagcttaaggctattgagtattttttcccttttttttcctccccacccccactaaagctattaaatatttgcagaggagagcactgtttagtggaattaccataagctttcaaatcaggcaaacctgggtccagatccgtttatctgcttgctgtgcaactctgggcaagcaatgtctcctctaagtgtctagctgacatctacaaagtgggcaccataatgtcatttggcagggttgtagttagaatgccactgattgagaatgccaaaggtctgtgtgatgcctggaaccaactggtgctcaataaatgtgggttctgcctgggcttggtattctctactaagaatacaaaaattaacatgcacagtggagcacgcctgtagtcccaggaacttggggagctgaggcaggaggattgcttgagcttgggaagttgaggctgcagtgagccaagatcacaccactgcactctggcctgggtgataaagtgagaccctgtctcaacaaataaataaacataaaataaaataaatataaaattttaaaatttaaaaatgaatctgggttccttgccttttcacctgttgtctggcttctgagtccctcggtacctggcataacactaacaggctattgcatgacttgaggctagaagccctgctacacggagccattagacaattgcaagaagattttagccgggcgtggtggtgggcgcctgtaatcccagctactcgggaggatgaggcaggagaattgcttgaactggagaggcggaggttgcggtgagccaagattgcaccactgcactccagcctgggagacagagcaagactccatcttaaaataaaaaaataaaaaaataaaagaaaatgccaggaagagtcttggacttggaatcagatttgcctcgcttctctccatctctatcttcctgtaaaacctgagcacttcacttctcctcacggagcctagatttcctgccttttaaaagaaattggctgatagaattagctagatggctctgcagttcctctccctttcatttttctatgtgcccaagaaaactgaaaatatacattcacacagaaacttgtaaacaaatgctattcataacagccaaaaagcagaaacagcccagatgtccataaacataaacaacatgtggtatatccatagagtggaatattatttggccataaatgaataaaatactgatccacatgacaacatggatgaacctttaaagcattatgctaacttagaggctgggaagggtgtgtggtggaaggagggatgaatgaaggttggttaatgggtaccaacatagttacagagaagacatacttttttttttttttttttgagatggagtttcgctcttgttgcccaggccggagtgcagtggctcgatcgcggttcactgcaacctctgcctcccgggttcaagcgattctcctgcctcagcctcctgagtagctgggattataggtgcccaccaccacgcccagctaatttttgtgtttttagtagagatggggtttcaccatgttggccaggctggtctagaactcctgacctggtgatctacccgccttggcctcccaaagtcctgggattacaggtgtgagccaccacgcccagtccgtgtatttcaaagtagctaggagagagcacttgcaatgttcccaacacatagaaatgataaacactcaagatggtggttaccccaaatgccccgatttgatttgatcattacacattctatgcgtgtaacaaatacatgtaccccaaactctgtaaaatattatgtgtcaataaaataaaatttaaaaatatattaagtgaaagaagccaggcacaaaggaccacatattattaagattctattaacaccagaatagggaaatctatagaggcagagtgtagctttgtggttccttaggttgggtggggatagagagttggggggaaggaagaatagaggagtgatacctaaagggcatgggatctctttttgaggtgatgaaagtgttctaacgttgactatcatgatatgtgcacacaactatgaatatactgactattgaattatacactttaaatgggtgaattgggtggggttcagtggcttccgcctctaattctagcactttaggaggcagaggcaggaggatcccttgagcccagcagttccagaccagcctgggcaacacatcatgacagccatctctaccaaaaaccaaacaaacaaacaaaaacaaaaaacaaaaacaaaaaaagcccggtgtagtggtgcatgcctgtagtcccagctacttagcaggctgaggtgggaggatttcctgagcccaggcggttgaggctgcagtgagccatgaccgtgccattgcaatccagcctgggcaacagagtgagactccgtctcaaaaaaactacaaagaggccaggcgcggtggttcacgcctgtaatcccagcagtttgggaggccaaggcaggaggatcacctgcggtcaggagttggagaccagcctggccaacatggtgaaaccccgtctccactacaaatacaaaaattagctgggcctgtaatcgcagctactccggaggctgaggcaggagaatcgcttgaacccaagagacagaggttgcagtgagccgagatcgtgccagtgcattccagcctgggcacagagcaagaatatgtctcaaaaacacacatacacacacacacacacacacacacacacacacacacacctctaaatggcgaattatatatgtagtgatatgtgaattacacctcaataaagcagtttaaaaaaataatcggctgaacatgatgacctttcaggatcaaactgcagatgatatttaaaaactataaacctggtatggtaggtatatggatgtttactatgcaattttatttttatttttattttttaggcagagtcttgctctgtctcccaggctggagtgcagtggcgcaatctcggctcactgcaagctctgcccccagggttcacaccattcccctgcctcagccacccgagtagctgggactacaggcacccgccaccacgcccggctgatttttcgtatttttagtaaagacggggtttcactgtgt[136 bp omitted]ggctggagtgcagtggcatgatcttggctcactgcagcctctacctcttgggctcaagcgagtttcctgcctcagcctcccaagtagctgggaatacaggcgcctgccaccacgcccggctaatttttgtatttgtagtagagacagagtttcaccatgttggccaggatggtctcgaattcctgacctcaagtgatccgcctgcctcggccccccaaagtgctgggattacaggcatgagctgctgtgcccggcccctttttctt[132 bp omitted]gcctcagcctcccgagttgctggaactacaggcacccgccacctcgcctggctattttttttttttttttttttggtatttttagtagagacagggtttcaccgtgttagccaggatggtctcgatctcctgacgtcgtgatccgcccgcctcggcctcccaaagttctgggattacaggcgtgagccaccacgcccggtctctttttctttctttctttgtttctttctttctttcttttttttttttttttgagatggggtcttgctttgtcatccaggctggagtgcagtggcacaatcatagctcactgcagcctcgacctcctgggctcaagtgatcctcccacctcagcttcctgagtaacttggactacaagtgttcacgccatcatgcccggctgttttgtatttttttgtagagacagggcttcaccatgttgcccaagctggtcttgaactcctgggctcaagcaatcctcccgacttgacctcccaaagtgctgggatgacagacgtgagctaccgtgtctagccgccataatttctttctttttttttttgagacggagtcttgccctgtcacccaggctggagtgcagtggcgcgatcttggctcactgcaacctccacctcctgggttcaagcagttccctgcctc[226 bp omitted]tctgtgaaatgttactgctgaatttgagaaaccaaagggccttcttccaaattctagtcgtgagttacgtaaggttccttagtgaggctgaacgagtctttgaacttgagcttctgcaggctagaggaaacacagtagtccctacctgcttcttccaggttctaaggtgggtgagacattttgatattttggtctttgtcgcccccacgaggcctaggagggttccctgtcgcagcaggtgtccaataaagatcaatccgccaggtgcggtggctcaggcctgtaatcccagcactatgggaggccgaagcgggcggatcacctgaggtcaggagttccagaccagcctgatcaacatggagaaaccccgtctttactaaaaatacaaattagcccggagtggtggcacatgcctgtaatcccagctactcgggaggctgaggcaggagaattgcttgagcgcgggaggcggaggtcgcggtgagcagcgctgagatctcgccattgcactccagcctgggcaacgagaacgaaactccttctcaaaaaaaaaaaaaaaaaaaaaaaaaaaaagtgagaaagatttacttgccacctagggtaactgctggtcttctttcccccgttagtctcgctcaggaggcgggtaatctattttaactctgcacctgctggactttgtgaatgggcagtttactctctggtctcagcagccccatcgataaaatgggaataacttgtctccttgtcaacagccagatggtggtgatttgccaaatctaagacatctattttcttgccttgttcttctttattttttcctctcagttttaaaactggatagtcccaggacttctcccaaaccaggatgagttgctcacctattttgtcctcacttgtatccttaagtccaaactgtcattaccttattgaccaccagggggtgccctacacacgtagtactgtggtttaagaagacagctcaggaggaggcaaagaaagagggcccagttcccagccttgccctgagttcctacaaaccttcacgagcctgctctacttcacacagcatcatgtctcacactcagcatcctcctggccctatgatatgaacatgtgtgtggtccagtggaaaggtcttttaagtactccagcagcctctgccaacactggctaaccagctgggtggacggtcactgcctctctgcccactgttcccaacatttccaggagttggcccagcatatcctggccggctgagaaggctgaggccacctacttgattttatttatttattttttgagacagggtttcactcttgttgcccaggctggagtgcaatggtgccatctcggcttactgcaaccttcgcttcttgggttcaagtacttctcctgccccagcctcctgagtagctgggattacagtcacacgccaccacgcccggctaattgtgtatttttagtagagacggggtttctccatgttggtcaggctggtctcgaactcccgacctcagatgatcctccgcctcagcttcccaaagtgctgggattacaggtgtgagccaccccgtccggcctctttaggttatctttagagctggatatcatttccctccatcacatagccttgcagagggaagtgacatcattgttaaccaaaataagttactgaggcaagagcctcaatcactccagagcttatatatccagagcttgagggcagacctgggaaaggcaagagtcacagaaaacctctgtggcttatggaaaggttttcaggaggcttagtatttatacatttccttaaaggagggaaggcaggtgggaagagggtgacagatggaagaatgattgagctcatcgtttttgttctgtacctgggaagataagcattatcagtgggaaacctaacagactttagttttaggagctagacttagattgcaaacctaaagttacaagggacatgttcttcttcttattattatttttatttgagacagagtcactctgtcatccacactggaatgcagtggcgccatcttggctcactggaacctccagctcccaggttcaagcgattctcctgcctgggcctcccaagtagttaggattacaggtgtgcgccaccacgcctgactaattttttttttgtatttttttttttagtagagatggggtttcactatgttggccaggctggtcttgaacgtctgacctcaggtgatccgcccgcctcgacctcccaaattgttgggattacaggcgtgagccacagcactcggcccatgttcttgttttatgggaggatggaggacagcaaacaacaatgtgtactggtggtcacgtggaggtacttgaggcgctttgtttttctgtgagggtctggctaacgtgtaatgctttgacacaaggttctgaagcaacagctgttgatctgggaagcagatagcagtgttgcataactcagtctccaggcttaaccttccctttggcataatgaatttggcagccctgagacttttaaaataaaagtctttacatcctactagccagctttgactagcagtgtgatccagggccaatgactgcccctctatggccttggcgttaccacctaaccaatagggatacggtactccattttcttgccatggagcaaatcaagagttagggcctgactgtcttcaactgtctcatgagttgaagaatttcagccctctgcctttgctctgtagcaacagacaaatcactagacctttctgatttcaggtcctatttgtagaaagacttt[135 bp omitted]tgaaatccccatctctactaaaagtacaaaaattagccgagggtggtggtgtgtacctgtaatcccagctactcgggaggctgaggcaggagaatagcttgaacccgggaggtggaggttgcagcgagccgagatcacacactgcactccagcctgggcaacagagcgtgactccgtctcaaaaaaaaaaaaaaaaaaaaaaaagaaagaaaagtccttttttttttttttttttgacaaaagccatctctgttgtattccctccctcagcatccggcacggcgccaaatagtgatttcattttaacttttgtgtagtgtgtgtgtggagtagcaaggtgcgcgacgcaggaacctttctcttgtgggtgcgtttctggcccgagtgctttcctgctgctctccgaatccggaagctgctggagaagtcggagcatcccggaagtcgtcactgcggccgcttccggacgtgaaagtttgctgcgtagggatagggagaccgggccggattgcggggagtgagcaggttcagcagtgacggcattcttaagagtcctgcccaagtgagggacttggggtgtgggacagagtggcccccagggcagtgggcgttggaaactgagaggccctgcgaaggaggcttggggaggggctacggtgaccaggggacgaggtataggaagaggagggcggaaagccttgagggtgggcttcttggatcccaattgccccagaggcacaggcctgggcatcactgtattatttcccgaggggagaaggggctatttcccatgggaagacaaagtgggatgaatagtggaccttgagaagagggggtggccaggaaaaggttcctgaaggaggcaggacccagactgcaggctggggagggtttgggcagccagagggaggtgagggtgctggagcgggggtcaatcggtcactccggccggagatctgagtggcctctgccccctctgcgctgtggagtgcatctgattgccagcctcgctggaccgttgagaggattcatcgagaccctggatatgaatatgcagtgtgaactgaagtttggggacatgagtaatcagtcacagtggcccaagatttgaggtgtaaatggagaagtcagaatgattcgctgcagctgtctggaacaggttgggtgagggcaagggtgggaaaggtggctgaggccaggttgtgagaggcctttcatggcaggctgagggggttatactatagggaggattttaaaaagaggagctggtggactggtgagcagggcatataggtgacacctagccaacttgagaggtcagaatacatgattccagaaggctaaggagaaggctgccagtagaggaaaggggaagaattcccagggcgaggaaaacacataagcctttgcgtgtggagctgtgtaaattcaaggtctggccagggggctgtgagatgccgtgtgtgcttggagcacaggaatgagaagtgaggtgaggaagtggctgggccacctcacaaagggcctcaaattctaggctgagaaactcggacttggtcctgagggtaaagggggccgggagaatgttatgcatggtgctgaagttgcattcaacacagctgtgagaagcatctgtcagggtcaggccagtgtgggaggggaactggaggccagggtaccagatatggtggtccaggtgagaaggaaggggccagaacttggcttggagaacggaggtcagtgccctcagggggtggaggtgatggaacttggtgcttgtctggctttggggagtgagggagtgggtggaaatggggacgtccaaagttctagatggtgtggcaagaattttgtctagatggtgtggcttcctcatgatcatgtcttggggttgagcaggggttctctttggtggggagctgggtagggaggtaatgcttcacttttggatggggcgatcaaattcattcatgtattcattcaaccaatatcgaattgattccttaccgtttcctgaaagacctttgatagattctgagggtagaatgttgaccaggatggagctgggccttggagagtggggaaggcaggcagtaacacagcaggcagtagatcaacgaggccatatcatggattgtgctgtgggatgtgaaggaaatgaacagacggaggacgcagagcagggcacctggagctaccacggtcactaaaagctgctatgaccaagtgttctgtgagctgaaacctgaaggccaggaaggagtcactcttgtgaggggctgaaaggaacatcacagagaggggaggagctagcacaaaagctctccagatgggagaggctggtgcactgggcaagggaaagccagcaccatggtgcccagaagggaaggcagctggggggccagtctacgcagggccttgcagagtgtctgggtttactctaagggcagaggggaaggttttgatcatgacgcactgcagtctgaaactcctgggctcaggcaatcctgtctcagcttcctgggtagttgggactgtaggcaggcaccaccacctctgcctaattattattatcattttttttggagagacagggtctcaatatgttgctgtgtctcagaggggaaggttttaagtcagggaatgattctgtgagcttaaaaaatcacttggaaattgccatagggaagggagggagaaggccaggcatggtggctcacgcctataatcccaggactttgggaggctgaggcaggcggatcgcttgaggccaggagttcgagaccagtctgggcaacagggtgaaaccctgtctcttctaaaattacaaaaaattagccggccatggtggtgcgcgcctgtaatcccagctactcaggaggctgaggcgggagaatcgcttgaacctgggaggtggaggctgcagtgagctgagatcgtgccactgtactcaagcctgggcgacagagtgagactctgtctgaaaaaagacacagcaacaaaaaaaacgagaggggagggagagagtgatggaggcggaggctgctgctgctataagctgggcgtaagtggtggtggtttgcgctggggtggcagcggcgatggtgggattacagggaagtgtgtggcttgctgacaggggtcatgtgcactgacctggtgtgggcagaggcaggtgctatcctggccatcccgcctgcggatgtgtgacctcaggccaatcacacgatctctttgagctctgcttccctcatctgtaaaacagggatcctcatggtgctttccttgtagctctgccctgaggatgctgtgcgtttagcaatggctgttcccgagtgagggctcaataaatgttgcttattgttgtcattatttctggggatagcagtgggggtgggggttgtggccactacagtgccactagttatatggtctgaaactcaagagagggattgtgttagtttcattgtgtctctatgagtgaatacctgaggctgggtaatttataaacaaaagaagcttaattggtttacggttctgcaggctatacaggacgtgtggtcctggcagctgcttctggcgagggcttcaggaagcttacaatcatggtgaaaggtaaaggggtagttggcatatctcatggtggggggaaaagactggcaggaggtgacacgcttttttgtttgtttgtttgtttgtttgtttagatggagtcttgctctgttgccaggctggagtgcagtggcacaatctcggttcactgcaacctctgcatcccgggttcaagtgattctcctgcctcagcctcccaagtagctgggactacaggcgcctgccaccacgcccagctaatttttgtgtttttagtagagaccaggttacaccgtgttggccaggatggtcttgatcttgacctcgtaatctgcccgcctcgccctcccaaagtgttgggattacaggcgtgagccaccacgctcagcctgacatgctcttttaaacaactagatctcatgtgaactcagcgagatctcactcattacctcgaggatggcaccaagccattcatgaaggatccacccccatgatccaaatgcctcccaccaagccccgtctccaacactggggattacatttcaacatgagatttggaggaggccaggtgtggtggctcaaccctgtaatcccagcactttgggaggctgaggcaggtggatcacctgaggtcaggagttggagaccaggtggctaatatggtgaaacctgtctctaccaaaaatataaaattgttatattttatataatacagctgggcgtggtagtgcatacctgtaatctcagctatttgggaggtggaaacaggagaatcacctgagcccgggagttggaggttgcagtgagcctagaattgcgccactgcactttagcctgggcaacagagcaagactccatctccaaaaaaaaaaaaaaaaaagaaaaaaaaaagatttggaggggacagacatcttaactatatcagggatcttggcaagacactcaggttggataattgtctaagtagaccaggggttctcagctaggagccatgttgcctcctagaggacacgggcaatgtgtagagacattttgggttgtcacaacttggggttgggggagggtgctactgccatctggtgggtggaggccaaggatgctgctcaacactctacagtgcacaggatgggcccccacaacaaagagtggtccggctcaaaatgtgtggtggcccacgcctgtagtcccagctgtttgggagactgaagtggaaggatcacttgtgcctgggagggtgaggctgcagtgagccagaagcatgccactgcactccagcgtgggcgacagagtgagactctgtctcaaaaaatatacatactgcccagtaaaatgtttaaaaagtaccttgtgtcccaaaccaaatataactgtgaggccttttgggcccttgggcctccagtttacaactggttgacagtggtctctggaattgttccataaggtaggagccatatgtggcttaaattttgattatgggaaattagtattttttgagacagtctccctctgttgcccaggctgcagtatagtggcacgatcttggcacactgcaacctccacctcctgggttcaagcgattctcctgcctcagcctcccaagtagctgggactgtaggggagcaccactacggccggctaatttttgtacttttagtagagaaggagtttcaccatgttggccaggctggtctcgaactcctgacctcaggtgatccgcccgccttggcctccgaaagtgctggggttacaggtgtgagccaccgtgctgattatgggaaatgtaatacaatttaaaattcaggtcctctgatacaccagccacatttcaagagtgtaagagtcccacgtggctagtgactgtcatagaactttccaccattgcagaaagttctgatggacagtgctctaggatgtagctgtggcaccccagggtcttggggctcgctgtgacagttactcctcttctgtcccccactctcagctgcacctgcagatgctgctgctgccgccctcctgcgaggccgtggcgccacgtggctggaggaggagctgcagctgccccgagtgctgccgcgtgtgcagctctccagtgcggctgcagcgccaccgcgcgttgctttcgacgccggagtccttcgcatgcgcagccagcgcccgggcctcaagtgccccaggacctggcgcagcccgcgagcccgcatcaggcttccagtgggccccgtgggcagtgccagcctttcccacctccgcatctggcaaagcctggccttcgctgcgcttcggtgtcgccacatgccttctggaaatatcacacctccccacctgcgcatgcagccgtctggccctctgtgggcctcggttcccgcatgtgccccgtggaaagaacataccttccccaactatctggcagcgtctggccttctccgggcctcggcctccccatttgctgggtggagaatcacggcccggccacatcggagccaatggctggtctctggacctcggtctccacatttgctcagccggcaggaacatcccttctcccgccctctacctcggtgggtggccacggccgagcaggcagcgacggcccagtggaaagaggacaaacccttgtgggccttagggcgaagacgtaactttgcttagtctcggtttattggccgatctcttgtcaagcggcggaatcgttccgttcgggaggtgggaggggagcggggccgccgggggcgggcgtcttcagtggaccccacgcctccggtcccctccccgcagggcgctccgcagaggcgaggggtgggagcgccggctccaggcggcggaacctccgcactgggctcgcgcgcttccggccggcgccttttcccagggactccgccaacccctcgcacccccgcgcccccagtccccgcgtccccggcgccgccggcccggagctgcccggaagtctcggttccgccgccggcgctcgccaggggaagcccggggccgcccgggacctcggcccgttcctccggacccgagaggccgccgcacggggtacgggggccgggatggagggaggagcctggccctgggacgacgccggggccaggcaggctgggggagtgcgctggagccacccgggatgggggtgggggtcgggagcggcaggatcgggcggagggacgggaggggaagtcgaggcgccagggctccttggggaagtgaaggcaataggaggggccccagggccaggggacaggcggtgtgtagcgggatgggggcgaaaacgcccgggcgctggggttcccataaacaaggggagcagagcaaaagaacgggcgggggaccacgctgtgtgtaacagggagagggatggggctcctggaagaggtgaacacgaggagaaagagagatgccagacgtacacagaaaggaggggaaagtgggcttgggagaggtgctgtgggaagcggagtcccggagcctggtgtgcataacggggtttgggagaaggcccctgatgggtacagaaagaagtaacgatgtcaccgccatatatggggggcgagagaaaagggggcctttggggagaatgtagcaggtagccaggttgggggggcggggtatacagaaggaaggcatttgagccattttggggtgtatagatgtagtaagacgatgggttccgtagtggggagaggtgactagacttcgaggtgctaagtgtaggaacaggatggaaaagccctagtgaaatgtggggaattgggttagtggggctctggggaggtacctagagaggaagtgagggaggccacggaatatgaagatggggaggccctgcggcatgtagtggggacggagggccaggaggccgatacgggggccggtgggggggtagggggcggcaaagggaggggaagtaaactgaactggggctgggcaacaggaaaaaagaagaaaccacagattagagaaatctcggcggtcaggaggcccggggtctaagatgtaaagaggtaaacagatttagggattgattgtctgctggggtgggttgagaggagaaaagggaagaaaagtcgggggactacgtcctcagacctgacctgagtggtgagaggtggacccaggaggagtggcaggtggtggcggggttttgcagagctcagttggaggccctctccgaggcagcttgatggaacgtgggagagccgggctggagtcacagtttttattttgctagggaggtagtcagtggcgcacaaagggtaacaagcagtgatagtggggatgctttccattttaggaaacttttcctaaaaggaagtggcaattttaactaatctcccctccgccgctcccagctgccgctccagatgctgctgctgccgccgcggccaccccaccctcggtcctcctctccggaggccatggacccaccgccccccaaggctccccctttccccaaggcggaaggcccctcctccactccttcctcggcggcggggccccgacccccgcggctgggccgccacctcctcatcgacgccaatggggtcccctacacatacacggtgcagctggaggaggagccccggggcccgccccagcgcgaggcgcccccaggagagcccggccctcgcaagggctacagctgcccggagtgcgcccgtgtctttgccagccctctgcggctgcagagccaccgcgtgtcgcactcggacctcaagcccttcacgtgcggcgcctgcggcaaggccttcaagcgctccagccacctgtcgcggcatcgcgccacgcaccgcgcccgcgccgggccgccgcacacctgcccgctctgcccacgccgcttccaggacgccgcggagctggcgcagcacgtgcgcctccactaagctcgagacccggcctgtgctgccctgcccgtctcagggccaccaagtctgacccacacagcgtcactcactcccacacacaccccctggctctgctgaggttactgccttaccctgggcctcagtttccccaccttccaaagggaggagcatcattccttccttaccccctttctagctgtgtgatgtagaccaaagtcgttgcccctccctgggcctgggaaccagtcggaactgggttccagtccagctgtgctgtgtgagcctgtgcaagtgacatgacctctctaaaccttggttttctgctctctggagcggtgaaccggtggttgtctgcggggaagagatgataaagagcacgggcacggtctggttcatttctgtatctaccccccttccgcccacgcccccgaccctttgctcaataaacattccgcactccattttcaggctcttccttgcgtgtgcgtgcacgttgggtgctggggggtggagaccggatcttcctcgcttgggtactttcctctcggtgtgtgtttctggccggagccgtttcgcgacggcccgggcgccccgccccaaccttccttccctagaccctcttctctcccttcggcttctctctttcggccggcgccgccagttcctggggcacacccagaggtccccttctcgccgccgcctgcaactgcgagggtagcccggggccgcttggagtcgcccggacctgagaggctgctgcactgggtacgggggccgggaggaggaagggggctgggggcgggcggcgggaggggctggaccgcgtggagggtacctgggccggggcgggagtggggcagacgccggagggggctgttctggagcttggagggggcgagaacttacacagaaaggcccagaaagcgagggctgcggccccgggggtggaaccccggagagcgctgggacctagaacgagcctggtggaggccgggcgaggactagagagaacctgaggtgggtggacgggtgggagcacggagttgttcagacacgtggctggagagagggccggaacctgggggtcctaacgtcggagcccctgtgaataggcttggcttgtatggagggggtcaggaaaggcttgagtatgtagcataggccaacacgcagaccctggaaagggctagaaggaggggagggagaggcctggaggcctgcggggtggggcacccagtgacctgggagggcacaaagaggaaggttagagcgaggtccaggttgtgcagaggaggtcaagagatcctgtgagtacagtgtatggtggagcaccgaggctaggagaggttttccaaggaggaagaccctggggaccttttagggggccacagactccagctgtgagcgggactggaaaagagggactgaggggcagcaggatgcagaggtcctgggccgggtatagggagggaaaaggatggagcctgtggtgctgagctgccctcttctatataaccttcttatcccatctcccatccaccaggcctcagccagccctccggatgctggtgctgccatccccctgccctcagcctctggcattttcctccgttgagaccatggagggccctccccgtcggacttgccgctccccagaacctggaccttcctcctccatcggatctccccaggcttcatctcctccaaggcccaaccactacctgcttattgacactcagggtgtcccctacacagtgctggtggacgaggagtcacagagggagccaggggccagtggggctccaggccagaaaaagtgctacagctgccccgtgtgctcaagggtcttcgagtacatgtcctaccttcagcgacacagcatcacccactcggaggtaaagcccttcgagtgtgacatctgtgggaaggcattcaagcgcgccagccacttggcacggcaccattccattcacctggcgggtggtgggcggccccacggctgcccgctctgccctcgccgcttccgggatgcgggtgagctggcccagcacagccgggtgcactctggggaacgcccgtttcagtgtccacactgccctcgccgctttatggagcagaacacactgcagaaacacacgcggtggaagcatccatgagccgggctgccgggtgccccaggtaccacaggactttgcagggagcctggactcctgtccagacacctggtgagagcctgaggctggtgttcagggccctggacacagacacagagcagccgcatctcaaaggcagagccctgcctgaaggaggaatccgtgagtaatcttcaggtcctccgtgttctggagctgagatgggaatgagcccctacacagaatggagtcctctagcctaaagatatcagctgttccatggcagagccttgactggatggaggtggggagtgtggtgtgtaaagtctctggcctcataaaaggtggctgtgggtcgtcaggaatctgcgccatcttcctggggcttctgcgctgttgttggggaagggaccccagtcctgccttccaccccccaaccaggcctgagactgatcaaacaataaacacgtttcccactctgagcactcgaggtttgtttttagagacagcatctcagaccctctttggtggccgtctagcagggagacctcagcttgcctggctggggaatgggaaggttggcctgccttggggttatcccctcctcagctcctgaagacctgggtcatctgggaagaatgtttttaactgaaacaattttaaaaccacaatctcctgttacaaacacattttatatggcaatagagtatacagataagcaaaatacacgtgaaccaagtttcctttttttttttttgagacggagtttcactctttttgcccaggctggagtccaatggcacaatctcggatcaccgcaatgcctcctgggttcaagcgattctcctgcctcagcctccctagtagctgggattacaagcgtgtgccaccatgcccagctaattttgtatttttagtagagacggggtttctccatgttggtcaggctgttcttgaactcccaacctcaggtgattcacctgcctcggcctcccaaagtgctgggattccaggtgtgagccacagcgcctggcctctttttttttagacggagtttcgctcttgtcacccaggctggagtgtaatggcgtgatctcagctcactgcaaccttcacctcctgggttcaagcgattctcctgcttcagcctcccaagtagttggggttacaagcgtgtgccaccatgcccagctaattttgtacctttagtagagatgggtttcaccgtgtttgtcaggctggtctcgaactcctgacctgaggtgatccacacacctcggcctccctcagggcacta[132 bp omitted]cctcagcctcctgagtaggtgggactacaggcgcccgccac[138 bp omitted]cccggcccacaaaaatttctttaccatagttagctttagtttgtgcatttttttttccatcaactattattattactatttgagacggagtctcgctgtgtcgcccaggctggagcgtggtgcgatctcggctcactgcaacctccacctccccggtttaagcgattctcctgcctcagcctcctgagtagctgggattacaggtgtgcaccaccacgcccggctaaatatttttttaaactgctgatttcatcctattctattgaattctccacccatgaacctgtagtttggaaaagaccaatctagggcagatggctccccctggaatttttggaccaggctgcagttaatctgtaaagtggggaggggaggatcatggtcacagctttgcaggcggtgcagacatttagattctccctccatcgggttaagaccttgctcttataagggctggccacagtccagagcttggatgcttctggtgaacaggagaggcaggtggagctgagcctgaagcttaataaacatctgcttattcattcatttttcttgcctattttgtgccaggcactgtgctaggcctcatttgctcttccgacctgtttttttgggaggaagaacaaatcttccgttcatactccccagagtgggaaagagcctcccagaggctgccatcataccccaccatctgacctcaaataataccagcagcgctcctctcttcagccctgacgatggccaggtgctgggctgagcttctgtgtgtcgcatcactgcatcctcacaataaatttagaagggcttgtaatttccccattttgcaggtgagttaacaggctggggaggagcaggaacagtcaggactggaatctagctttgctccaaagccagctcttaattaccaacatggggatgggggtggcgtgttcctggccctcattttccgggagaggggtaactcccccgattttggcccccacatccctgagaaccttggggtctggctgtaggaggtaggggagctctgaggggtccgcgctggctagttcctgagagagcgttaaaagtagattctcctttcgctccaactttctcggtgtctcaaacactctcctgccttctgggcccattgggcacaccgccacccaatccggggacccccggagactcgccagctctccaggatgggaatttcgtgatgttccctgcctgagcttcggggagggcgggggagtgctgtaaggggctatcgcgcaagtgcagaccctctgcttctgccgcaaacggcgggcctcacctggacccggggactcttcaacgaggggcgctagcctggcccgactgggcgagtccccgcgtccctgcccgttccgtcgctcagttccacgacacgctcccctgccgccccgcctgttcgcgggtgggtgggcgcttccctcggctccccgtgacactttgcagacgctccccggcgccgggcatgggcgccgccgccgtcggtccccgagccggattccgcgagcgggtgggtgagcgcggggggcctcggcccctcggaccccgggcacccgcgggcgggggatggtggccgcgtttgcacccccgccctagtgcatgttcccgctggaatcgttccacgaccgctccccctcccacccgcgggacaaagggcgggggcggggggggcgcacccccacgcgtgacctttccccgtactgcgcacgcgcccagcccccaccaccgggggacggtccgcccgcccacgcgagtgcgggggaggggtgtgggggccccgaaggtagaggaggcagcgcgcacgggctggacctcctcctaccctgggaagttggggcagtttccccctgcacctgcctcttccttaggcctggcagtggcccgcgatgagagagggtccttccccttcaggctaggtgtccctggtcaggcgaccccttggggcacccagcaatttagggcttcagcttccttttccttcgatacccaggagcccacgtccccagctcacttctcccccaggacctaggcggctgggccccctgcccctgactccaggagcccaggagtttgaagcccaggcgcgttttgcctcagtcctggggtccaggctccctcctccctcagaccaggggtccaggccagaaggtccctcctgtctcacttcacctcccccaggatggaccctccagtccatctgcgtctctccatttgtggctgccgtttctgtccagtgcccctgaggccctcggctgctggggtccgtaggaagccgcgccatgaatgaccggagcagtcggaggcggacaagtgaggaagctgggtccccttccctaccctgggtcccagtgcggtcggctccaggctgccgtggttggggggtggcctgagaggcccggggaattctctggggtaacccggggcctctcctctccagtgaaggacgatgagaccttcgagatctccattcccttcgatgaggcaccccacctagacccacagatcttttacagtctgagcccctctcggagaaacttcgagggtgagctgagggggtgtggagggactggagtcagctgggaagccaagccctgagtcccagggtgtgacctggtccccccaccctcgctgtgtccctagagcctccggaggctgcgtcctccgccctggctctgatgaacagcgtcaagacccagctgcacatggctctggagaggaactcctggctgcagaagcgcatcgaggacctggaggaagagagggacttcctgcggtgccagctggacaaattcatctcttctgctcggatggaggcaggtgtgtgtggggtgctctgatccacatgcctccctgtcccgctactgggtacccgctcacccagactcaaggctccactgtttggctggctgggtgggacctgccatgttggccctatctgctagtcccctgcctgttttgggcccccaggcccagctgcctcctcacttgattccagggcctcatccccatgaactgtctactggggcccgtcctcctgccttctccgtcagctccccaaatcccatcagcctccagtgccctgccatctgcttccttggcccatggtgacttcagggaccctggcacctgagagcccctctcttctgactcctagggggaccttccttcatctctttggccaagaggcccaccctagttctttgggtttcctcagggggcccctgctcctcctcccgtccctgtcttctccaagatccaagagtccagccatccggcctcctcctgtccccccctcccctctgtgacaccaggggccatcttcccacccaccctgtcccatccttggttaatgagcactccttccccatcaaagacattaagtcccttcctttgtgggcctttttgggtggtgaccccagcaggtgctgtccctcaaaccctgcctgattcctgggcagtccccacccacataccttgctctgctataattcatggccagaagcagcccagatagctcccacagcagcacccagccccagccagttcacagctagcgtcttctcttgactggtgggaccctgtgccctgtttaatacattttggaccccagccccatcctcttccccggatggtcaggccgtttgcccgacagcccatggcctggagaacccacactctaccccacctaccctcatctcagccttgctagctccttggctgggaagacccctcaaaagctcccacatctctctttgtgaattcaaccctttccccaaaaatcctaggcaagggggctatggtcttgtggtgtctctgttactggaagcccagcatctggggatctggctttccctctgctcgggaacaaaccacctctggctgcccttgggcctgccactgtctcctctcactgatggttccatcctgggtgactgactcctttgcacagacagtttggccctgcggcttcggcactttcccagtggggaccctggcaccagagccctcccctaacccgccttctagaggaatctgtgtctgggcctccgcctgccggctccctctgtctagatggaggtgggacccagcctgctggacccagggcccctgatttctctcggtctgaccccccgactccagccaaggccttgcctgcctcctgggtttccagaggctactctccagaggtcccgcccagtccccagaaatttctccctcccctatgggaaccgcgcatagtcacaggggtcctgaggcccctggtcggctgcctccgtaagacctcttgccaacccaggcctctgagaaaatgctccacccattaccacctcccacagaccccaactggctctactcagccaccagcgtctctaccgtactccttgtctctctgtctctttaggggaccagcccaggttgggggatccagttcggggactgcagcctctctcagtcccgggacctgtgatgggatgtctggtcccttggttcatgtgtgtgtctccatctccccagaggaccactgccggatgaagcctgggcccaggcggatggagggggacagccgtggtggggctgggggcgaggcctcggaccctgagtcagcagcctcctccctcagcggagcgtccgaagaaggcagcgccagtgagaggaggcggcagaagcagaagggaggtgctagtcggaggcgctttgggaagcccaaggcccgggagaggcagcgaggtgagtggggtgcatggggcgggcgctgaggggcccgggctgctgaattgctgtgtgtccttcccagaggtccccctttctctccaagcccctccagccttgctggagaaagacccaccgggttctgtctctccctcctccacgtgtggtcctgggtttactttcttttttttttttggcgggggggacgtcttgccccgtcgcccaggctggagtggtgcagtggcgcattctcacctcactggaatctccgcctcccgggtccacgccattctcctgcctcagcctcccgagtagctgggactacaggcacccgccaccacgcctggctaattttttgtatttttagtagaggccagggtt[145 bp omitted]agggccaccttgggcacctccttaactttcatcagtaaggaggaggtgcgcagtaggacctacctcacggggagggtgagacttgaataagtgaattcacctgaggcagggagacgagggtgatggctcggggtgtcggggggtgctgggaccgcgtgggttgaacccggcctcttggctcattttgtctcctcactctccttcctgggcctgcctcttcccatttcccactggtccaagatctggctgcgattcttcccctcctctctgccccttccttgcctgttgttctccgtctccacctgcaccggcccgtgcctctgctcgccgagatcctttcttcccatggccgtttcccttcccgtgtccgccccctcagtcttgtgccctgcccctcactttcgtgtccccgcctccacccctcagtgaaggacgccgacggggtcctctgccggtacaagaagatcctgggcaccttccagaagctcaagagcatgtcgcgggccttcgagcaccaccgcgtggacaggaacaccgtggcgctgaccacgcccatcgccgagctgctcattgtggcccccgagaagctggccgaggtgggcgagttcgacccctccaaggagcgcctgctcgagtactcccgccgctgctttctggccctggacgacgagacgctcaagaaggtgcaggcgctcaagaagagcaagctgctgctgcccatcacctaccgcttcaagcggtgatcgcaccacgcctccgcgcctccacccgggccttcctcccccgtggaccccggtggatgacctgcccctctccccgccgcgcccctgcccctcctcctcgctccctgggttgggggctcccttagccgggcccccaagcgcgacggccccggaccggccgcggccccttcccgaacgccggcacccccttccgcttgggctgcccagccctgtcctcgccgggccccttcctcctggaaaaccaggcaggcgggtgcccccccctcgagtgggggactgtacagaccccgtctccgccctggccccgcggaggagctgcccacctgattcccggacagacctccccaactccgcgtgagacagagaattattcagataatttaaattaaaaaacgacgtgaaaatttggaataaacttggcctcagcctcttcctaggagggggacgtgcctgggagggggcggccgtcgccccgaagacggtgacggggttgcgggggcttccaagggggtgggtggtcaggcgggaggacgggtaggatacggtgtaattagccccccggaggcagagatggagagtgaagcagctgcgcccc[359 bp omitted]cccgctgggctacccagaccggagcgcggcgcgagaggcgtgagtcgatgacctctagcgagggaggccacctagcggccaggccaagtctggaggatacttccgttgggccgccagggggcagtaacgccagatcatctgtctcccggaagtaatgccagatgatccgtctgccgcgcctgcgcggcgggaagagccggagcgcgttgatgtggttgccgagacaaccaagagggtggccggatttaacggctggggattaagcactttcaccgttgtaagggaaatctcgcgcacgcgcaatggggactgaaacctggtccccgcaacccccttcacgggagcagtgggagagcgcgccacagaacgacttttacgcaggcgcagaagcctgtttcccctcacccgcggcttccaccctgcgcaggcgcaaaaagccgcgctggcaacctccgcagcggtcgcgcgcacccttcatccctcttgctgcttttgtctggcacaaccttctcaggccctccgcgaggccggccctttttttctttcactttccccacccggagagccaggtgccgagaactaggacctcgtccccttctctatcccttcccctgatccatctcgtctctgttctccttcccttttccgttcccgaagccggaaggagccgaggtacccacggaaaaagtcgaagctgtccccggagagtgaggccttcacgaagcggtggcggaaggagccgaagttctctgatcggaggcgtgagcaagtggcatctccggaaagagccgaaacacggactcgagcttaatcccaggaggggcccgagggcgagatccggaaatctccggaaagagccgaaggccgggacggttaggattgtcggaagtggccgattgcttggacagggccggcggagaagatcggagcaagtccgtggaagaagccaaagactgggacggattgaattgttggaagaacccgaactcgcagaggggactgggcgcagtggcacacgaggacacacggaaacctccgaacgttgaggagataatctcggaaaagttacggaaacctgggaagtcggcgaaaccctacgttcgggtgttttcggaagcagccgaagcggccgcctgcttcgccttcgtccagtatccggagatagccgaggcgcttcggagccaggctcggggggaggggcaagctcgcgggcgggcgggcgggtgagggggcggagcccgggcggggcggggagggctgccggaggcttgattaggtaggaggtggcgaagcgccggcggcggccggaagtagccgaagccagcggcggaagtagccgaagcggctggagcgggcggcaaggcgaggcgaaagctgcacagggccctacgcggccgcctcagcatgtcggacttcgacgagttcgagcggcagctcaacgagaataaacaaggtgagggcaccggggtcgcggggcggaggtgtgggcggctcctcgcgtcgctctttgcccccccgccattttctccctcgcttccccccacttcacggccgcgcggcgccccccaaccctggttccgtggcgcgcgcctcgttcacgtgacgtccccagcgttccgccgcgcgctaggcgaggggaagggggcggcggggcgcgggcccgtgacgcatgcgcacggcggctgtccctgcgccccacgtggtcctggcggaggtggcgcgggggacgcggcacgagcgcgccagatgcctcgacgtgaacttttgttttttaaaatctttttggtttctctgaaaaggagattatgttagtccccgtaatctcttttctcccgctgccttggcacttccgcttccggtcgggcccacggcagcgtctccacgccccctttgtttccaaaatggcggttgtgagaacttggtgggggggcccctttccttccttcacgtggatgagggcagagccgtttcggcggatgcttggaggccacgggcccctcgcgtaccccttttcctttttgctgatttgctctgatctctcccgccaggtggtttctgccccgtctgttggtagtggggcgcctcatattaacgtgtttggcacatgttgcctaaaagcatctgcattctttgagtgtccgcacgcacacatcctgcatatgcggggcttttggcggtcccgagaatcgcgatatggagtgtttgagacaaacctcaaatcatttacaatcccaatctcagggcacctgataatactcagtctcagatctcaatatagagataagaaaacaggttctgagggaggaagagggatctggcccactgcgctaaactcttcacttacggggaaggtgggaggcaggttcccttcagggtatcgaaaattgtgatgggttagaacaaaaagcctggggccctgatcttagggattccaataatattagaagtgggagagttgttaagacgctttaaaaatcctccgtgtttcagtttgtgaagaaatacaggaccagggaagattggagacttgtttcttttcaggcttcagctgcccatgttcctagctcgttcggaggacgaaatgagggctgaggaattttcctttgaacccgggctagagttgggtaggggctgtattaggaaacagtgtcctggggaagcaataacgtttactgagggtctgactctgtcttagttgatggactgctcaagagcataggctttggagttgagcacatcaggaagtttagatacctgctttgtcgtttagtaactgcttttaatacgtttatatatttttttccatttgtagactgattattattttcttgttaccggattttgagaagattaaaaaggatgatagtaacgatagatgtagttaaactctgagcgcttaccgtgtgccaggctcttcgctaaactcttagcatgttttactaagtggatccttttaacagccttgtgaggccaaaatgatttccacctctactggggaggaaactgagggctcagaaaagttaaaaactttctcagggctcagctagtcagaggcagagctgagattaaatggggtaacatgtaaagtgtgtggcatgtggctttgcgtacactgggtgtgcagtaagcgatatttgcaattgtaaaattccatgcttagagaggagggtcttccgctcacagagattgtgtcagagttgggaaagggcaggaaaaggtgctttccaaatgtcattctgccacacaacacctggatggagtagatacgaccctcgtttaaagagaaaaccaagtcttaaaggctaagttgcttttgcatggtttttgttgttcataagcagaaaagcaggtactgattctgagctctggctgcaaggccaagttccactctgctggaccaagtggagctgattgggcggttctttgaggctctcagatggtgcttcaccggttctcccggggtttcccttttggtgctggtagggcagtccctgagacctggcacggctcctgggttggcggagctgctcccataagatgaccacaatacagtgttttgagcaaacgaagctctcattgtttttacctgtccagcatcagtgtgtgggagagggttcttgccataggggaagctctgcccgcgtgtcactgcctgtagtctttgtctctgcggaggacgggccagcttctgtacgtgtcgccttctgcttcagtcctttcctctgctacctgtatctacagggaatttccttgtctatatcccaggcacccagcgggcatcattgctttctctgcgtgggttcctgtctgcctgcttgcctgtttcagagccttagcagcagaaagggctcttggggctcacagcctgtccatcttataagcgaggagctgtgcccagtgccgtgcctgtgtgcccgctgctctacactgctggcctgtcctgccgattgttcctcccaatttcagtttttgattttggggtttttggccttcaaggggacaattatattgtcattaatggttctagccagacctgagtgttctgcctgatccacattcgagagtatggcctcgtgcttaactcactgatgtcagagtgtttaaattctggtgtcaccatttcctagctgtttgaccttggtaattgtgatctctctataccttagtttccttacccattatgtcagcccccagcagtgtttttccgaagcagtagtgaggattaagaacaaacaaaacaatttagtacagattccggttgtaggaagcatctcaatatttgttgctgtttttttccctgctgggtgcatatttttctgagtgttggtggttttggaattgtgatgcttttccagacattcacattgcatcgcaaaaacgtgagacaaaacactgtgggtgaggctgaagtttaacatcctccctcagtgccctttcctcctcttgtccccagggatgatcactccaggagatgcgtgttaacatatataagcaccttaacgtgtgcatctgttttgtgtgtgtgcttcatggctagctgagaaatctgggtgtctttgaattaaggaaatggtgtggcggtgctcatgaacccccccgcccccccatgctcatggtttatcctccatcttgaagggccggtctctcttcaggggttgaagggtctggtgagagcagaggtttctgtggttttgccagtgaggctccgttcctagtggctacctcaggcaaatagagggttgagggagcctgctggaggctggcagagatacccgcccctactcacgcctttacagtctcttcagtacttggctttgaagggagtgaggctgagagattcaagtggtttgggattcaagtctggatggggcaagctcctcccctgacctgctgaaggagaggagggcctctttccccttcagtctgcagattctccgaggcccttctcttcccctgggaagggtgcttgcttctgcattattcaccggcttgggaagggatgggttgagtttccctgcttcctggggatatcagatcctgcctggcacctgacccctagtcctgatggtggggctgtgggtgccagctagttgcagaggtctttcctgaggggtcgctgggtcccttcaggaaaacatcattgggtctcttgattccccagcctctagccctgcccctctcagggacgaccctggggtcaggcccctcagccctcgagggggaccaggagccagcctcctctgtcttctctggctccccagctcctcctgagcatcctcaggtatcttacaccccgggggcatttccaggccccgtccccctggtcccctcatggtccctggactcgcttgtggacccaggaggcctgttaattcccttcctccattgaatcccttccctttgggggtggcctccctggggcttgggacatagccaccagcgcgcagggtgggctgggcccgcatccttactccgcttatcccgtgcccctcctctcacccttgcccagagcgggacaaggagaaccggcatcggaagcgcagccacagccgctctcggagccgggaccgcaaacgccggagccggagccgcgaccggcgcaaccgggaccagcggagcgcctcccgggacaggcgacgacgcaggtactagggctcagggatcccctgggccagcctgggagtcggggggtcggtgttggccggcctgtgggtggcctgtgtgtgtctgtgtctgggtccgggccctgtgtggctcgttcgttctttgtgtggatctgggggagggatctactgcttggtctgtcttggattccgattttttcccccgtttctggggtttctttcattttctgtcttggtggttgctggtgggttgctgggggcaataggctctttatctggagcctgggaattgattctgtgttttccttcacaaggggttgttctctgtctctgactctgagggcctgttccttcttttcgactctctgtggctctctgtgggactctcttcgagggggttggtctctgcctccagtttctttcttccctgcctcccaggagaagggagctcttgggaccgaggcagtatccacagcctgggctgactttttggcccaggggtgtcggtttccaccgcctcttcccttctaggctcccctttctgttctctgcctccttaggtgaggaagggcaggataggcggaagtcctcctgcctcctcccggctcagtttctccagctagagactggtccttcctggcccctggcccctttctcctttcctcacttcctctttcctgggggtgggagtgtttggggggaaatggcagggccgagggtggcctgcttgctgcttgttgacctcggccctgctcccaccctggggctcagtgcccttgggggggtgtggcatgtggggaagacgagggtccccagtcacccctccccatacctttccctcccaccccccagcaaacctttgaccagaggcgctaaagaggagcacggtggactgatgtgagcttctcttcctgccccttcctccctgatgtccactcccttcaccttcctcacgcccgtgcaccctgtcccgcccatttccagccctggcccaagcactgggaagagtccacttaccttgaaaccagcacccctttcccaggccctgccccagaccctctccttccctggagagagtggagcttacatggttgcggggagggtgaaagggtgcctgggagggggctcgcaggcccactgttggtcagactgaggttgccctgccccgctctcccctcccacctcccccagtcgttccccccgccacgagaagaagaagaaggtccgtaaatactgggacgtgccacccccaggctttgagcacatcaccccaatgcagtacaaggccatgcaaggtaggcccctggccaggctgctcccagagcgggagggtacaggggttgggattctccgtcagtcattcccctgcgtgtgtgcttggagggggtcaaagacacaggtagagggttgcacacccctgggggttctggtctctgcgcttttgaagcctccctagaggaggaaatgaccagagacacccgtggttgacaggggaatgaggcctccatctggacgccattaggaagtgaggcttctgaggagcagcagttactgggtgggggccccgagggtggaaagagggttctggaaggtgctaagaccgagagcctgtaggagctttctgctgaggaggggaactcccagtgtgtggtgaggggtggtcactgagcattcccctgatggggttttatccggcttttattccctttgaagctgcgggtcagattccagccactgctcttctccccaccatgacccctgacggtctggctgtgaccccaacgccggtgcccgtggtcgggagccagatgaccagacaagcccggcgcctctacgtgggcaacatcccctttggcatcactgaggtactgccctcccctgccccctaccctctcccttgtccctctaccccgttcctccccttccctccattccctttccccaacctgcacgggtcagactctgctcctgcaagaccccccggccccctcccagacggaccgatggagttgagccagccaggggccgggctgggggtggccctccctccctcctcttcccctctcccgtctcccctccccccaacctcctccagcaacccagggatcaagcacacacataatgtacccacgtgttgtacctacgtgtcggagagagacagagagggagacttggacacacacacacacacacacacacacacacacacacacacacagacgcacgctgcccctcagtttttttctgacacgcctctcgttctctgccgcctgtcccctatcctctcccccacgtccctcccatggtcgctgttcttttatttttgatcgcccctgacctcccccttccccaccactccttttccctctcccctctccccaaccccttcctgtggcaccccctgagaatcccgagatcaaagagttgtttccatttctctttaaagtgaaatattgtggggctgagatccctcgtagcaacaaaaagtttgctaccatcgtcgaaggcaagtaaggtccattctgactttctcaacctgcactttgctacatttgataaaccagcccccggactccagggccagattcctccacatcactcttttctcctcccctcccgtccctgcccctcctccctacactcctcctctcctgcccctgcactcttgacttcctcctcctcgctcgtctctgtcctgctctccctttctgtcctttgctcgtctctgcccctgcctgccacttcctttctactttcctgccacttttctgtctgtctccactgggtggcccttcctgtgtgctctgtctcttcatctcttgtgtttcgtgtttttcttcattttgtgttgtcatcatgccctctgccttttcttgaacaatcttctcctttcccctgattttttggggcccctgtggctgtcccccaacgcctgtccatcgcctgcccttggccgtctcttgctactgcttcctccccattttctctcttgcttctgttcttactattgacttctacacccccacccatattccactgttccttccccccctcctccctcccctcatccctctccccttacccccaaacccctctgtgtctccctctctcacccttcccctcctctctccacctcccttcccccgcccccccccttgtctcctattccctctgcaggaggccatgatggatttcttcaacgcccagatgcgcctgggggggctgacccaggcccctggcaacccagtgttggctgtgcagattaaccaggacaagaattttgcctttttggaggtgagctgggggagtgagtgaggtccaggaaacgtgtgtgatgtgagggcccagcccttaggctgatgttgtgtggagctgccttgtgctgtttccaccaggccctctgcagcctcttctccacccggtcgctgaagtgagccctgttatagcattacagatctgatcctactttctgccttccatttgctttctgtgtgacctgagaggcctgtttggcctctgtagacctctttggccttttccagaccattccggcccagtcctctctgcactctggccacactgaccttcccagaacctaccatgctcctgcctgcttggctagagttctttacaccagctaactgatgttcctaactagtcttctgttaccccagctaactgatgttcctaactagtcttctgtgtctgtgtttctcaactgtcgggaaaaggccttggtttttgattttcgactcttggtggactgataactctcatgaagtattgtgaaggtgtgggcagtgttagcttactgcagagatttctgagcactccctctcactgtctgagcactccctctcactctgtccctctcactctgtctttgcctcactgcagtccacttgcagttgcattgctccggagatgggctgaaatgtccccctcaccagaaagactccagtactgtcatctccccgttcaactaacctttcccgtaacatcccttttcagcactttgtccctcttccgtgtcatcacagcctgcaattgtgtgtttgcctctgtgtttgtgttgggtgcctggtgtttttaatggtcgagtgtgagctcctggcagcagggacatgcgtgtctgttgtactcccagtgcccagcctggggcctggcatgttgtatttgttcacatgagtgaaaggaaagaggaaatcccaatcctggaacactaggggctgtactagtccctgacccccatccctcaccactcctttctctttcattcagttccgctcagtggacgagactacccaggctatggcctttgatggcatcatcttccagggccagtcactaaagatccgcaggcctcacgactaccagccgcttcctggcatgtcagagaacccctccgtctatgtgcctggtgagtgggggatccattaagggcccctttctcccccagtcctgttcccatggcctgtccatcccttcagcccagctggagtggcttaggaagttgtgtaagtactgtggaagataggtgccttttccctgcttcccctaagtctctgtgagtggggtgctctcctgctggtagagaaggtgcctagggccgggagaatgagctgtcacctgctgaggacacacagcttgtacgtggcagagccaggatcagaccaaaggtgctggggaagcgaggggcttgtggcctggacctcgtgcctgcgttgcggctgtgggaccttggagggctcagtctgtgcccgtcggggctgctgtgtgtcgacggttggcagcaaagctgctgctgtggggtctggcacctgggtattcacttgtttttgtctcctagtgtttgccttgaatcttgtgttctgggccattccccatagctgtgttgaacatcatctgtaattggtaggtaacatagcagaccaggggttggcgaccatgtcactgtgtgtgaaagcagccggacggtgtctgcgtgcgtgggcctggctgtgtgccggcacacctcgacacgcgtggctgctgaggttgggctttcctgtgcttctcacaggccacagaatggtctccctttagaaagcttgcaggatgtgcaaaaccaggtgatgggccctgtcagcccacaggctatagttggctgacccttgtagctgatgaatgggatttgagggagggcttgtctgatgccctgtcagggtgcggctgtgtctcaggcctgggacatggaggaggtggggttctgctggcgggtactcactgttcgaggagccctttaggaactgagtcagctcttcagggcaggcgatgtggagccccagacggaggcacatctgtgtcaggcaggacttgggctaggtccctcactggcctccagtgcttttctttttgttgttgttgttgttttgagacagtctcgctctgtcacccaggctggaatgcagtggcacgatctcggcttactgcatcctccgcctctagggttcaagcaattctcctgcttcagcctcccgagcagctgggattacaggcacctgccaccatgtctggctaatttttgtatttttagtagagggtgggtttcaccatgttggtcaggttggtctccgacgcctgacctcaagtgatccgctcacctcagtctcccagagtgttgggattacaggcatgagccactgcgctcagcccagtgcttttccatcatgggttttggtaaattcagctaaccttttggagcctgtaatatatgttgacatgctcccaatcgacatggactttttacgtatgggtgcgtttccccgatcaagctgcagaatgtcttccccacgtctcttcctggtgaatccactgcgttttcattcattttaagtcccatgagtggcccgccacttgctggtgcttagtgtgtgtcaggcgctgtcctaagtgccctccatgcacggcagttctacgacacagggattggcgctgtcctaagtgccctccatggacggcagttctacgacacagggattggcgctgtcctaagtgccctccatgcacggcagttctacgacacagggattggcgctgtcctaagtgccctccatggacggcagttctacgacacagggattggcgctgtcctaagtgccctccatggacggcagttctacgacacagggattggcgctgtcctaagtgccctccatggacggcagttctacgacacagggattggcgctgtcctaagtgccctccatgcacggcagttctacgacacagggattggcaggttacaactgagagtccaacgctggcccactgcctgttttttgtttttttgttgtgttttttgagacggagtcttgctgtgttgcccaggctggagtgcagtggtgtgatctcggctcactgcaacctccgcctcccaggttcaagcgattctcctgcctcagcctcccgagtagctgggattacaggcatgtgccaccacacctgctaattttttgtgtttttagtagagatggggtttcaccatgttggccaggctggtctcaaactcctgactttgtgacctgccttggcctcccaaagtgttgggattataggcgtgagccactgctcccggccactgcctgtttttgtaagtaaagatggatggcggtgcagctggcctcactgtgcagcgcctccttcctgggtagggacgtgtggtgggccttggggaataggaaccgtgggttatggatctaaggttgcttctcttaccaggctgaggagcttgactcttctgaaggtgatggggtgctctggcaggggctgagctgagggcaacccagtgatagtggctgccgagctcctctcaggcgccccctgcaccaagatggcctggtcaccatgggaggggacattgctccatcttacagatgaggaaagagcttcgggacaatggggatccctgctgggtcttccccacacagcctctgctccaggtgtgatgctttgtagatgcagccgctgcagaggtatggggccctgtttccccgcccaactcttggaacatccctgccaagcagggcttgtcctcagtgatgagtggaggaactcaagactccgagaagattcctttgaagttgttgtcatgtaacagcggctgaccccactgacagtgctcacagtgtgtgtctgggctgggtgggtcctgttgtgggcattgagtctggcagatgcccgggccatggggactgccgtgcctgttctcacgtcctcgattgaatcagcacttggcctgagctgttctcacacacgtggctcacacgatgggcaccagggttcttcccattctacagatgaagacactgaggcccttggaggctcatatggtacaaacaagacttgaacccaaggagccatgaacccagggagcccaactcttgtatccttggctctgtgttgctcaagtgagacgggcagagccagggctcgcggctgagcttccagtgtgacccattcttccttggacccaggcagagcctgcagcctgccatgctgcctgtggggagtcacagctgagtgtgggctctggaggctgcctttttcctgcctgtgtgtctttgctctgtgcctcagtttttgccttctgtgctgtatgtatagcattgcagtaggaggttgaaagtcttacaggatgcctggcccatggggtgagtgcccggtgtgtgttcctgctcccgggctgctgctacttgtccctgtagcataggagctgggtctcctggggtctgtgtggccccagtctggtggttggagctggctgggttggtgcttccagttctgtgggggcagcgtcatcatgggctggaagggcttgagtgagtaggtgggagagggtgtgtgggggcatctcccctccttccatgggcacagcggctcatgcttctgaggctctttcccatttcctgtcttacctattccttcccagcatcaggatggaggtgggatggggccactcacacttggtgtggaggctgcagaggaaggggaggccatatggcctaggttttgaacttgggagtcaggctggttggttaccggggcctggcatagctgatatctgacaggacggcgtcaagttacattggcagagcctgtggggtctcaggttgaatcatcccaccagcaggcacttgtctgtgagtccagagttcagtggatagggcaggatcgagggccagtaaattcagctgataagcccccactctggtatgtcagccctcgaagacactggatcctgcatcccacagtcagcccacagttcccagtgagatcagagcagctaatgctgcggatgctgttctgagacttcccgggcagccgcggctgctcatcgtgtcgtgccacccctgtgagggcagttgcacccctgcagtggcacctgcagttctgacagggcgtgaagggaagggactgagcttttttttttttttcctttgagatggagtctcactctgttgctcaggctggagtgcagtggagtgatctcggctcactgcaacctccgcctcctgggttcacgccattcttctgcctcagcctcctgagtagctgggactacaggtgcacgctaccacagcccgctaatttttgtgtttttagagagacggggtttcaccatgttggacaggatggtcttatctcttgaccttgtgatctgcccgccttggcctcccaaagtgctgagattacaggcgtgagcccccgcgcccggccgggactgagctttaatgggagccttgcctgggtggctgtcagagaaggggtggggtgtgttgtgactcaccagtaggtcccgagcccaggtgacctgccagcattccacagcagcaggtagcagatgtgggtgtgaactttgtgcctttggagcgttctggaggatgttctagtttgaggttcccctgaggctgggcagatttgggagacatggtgcgttctccccgaggagcctctgtgtgccactgcccaggaccctcactggtcagataaggctggggtggggtgggcacgtggcgacccctccctcgtcagatcaggcaggaagtgttctctttggcaattgaggagctcgccgtagactgtccaggttttgggagataacctggtactggaattgaagtcctcctcttctctacccataggggttgtgtccactgtggtccccgactctgcccacaagctgttcatcgggggcttacccaactacctgaacgatgaccaggtaacttccctgcctccctccagacccgtccccccaccccgccccacctcatcccagccctgatggactctcggctactgcaggtcaaagagctgctgacatcctttgggcccctcaaggccttcaacctggtcaaggacagtgccacggggctctccaagggctacgccttctgtgagtacgtggacatcaacgtcacggatcaggtgagtccccggtcgctggccgctgccgcgtctgtccttccctgccctgcgctgttgccaagccatggtctcccctcctcaggggacggggcgggaggcggccaacctgaggcagtgccctgtgtgtgggctcgtccctgtcccatggcgttggctttttccaggctcttaatcccctttgccttcccctcttcccccaccaatgccccggcttgggggtaggtgtcgggctcctggtccctgaccccacctctccccgcaccccccgacccctcatcctccaaacacaggccattgcggggctgaacggcatgcagctgggggataagaagctgctggtccagagggcgagtgtgggagccaagaatgccacgctggtgagccccccggcacgtcatcttccattggcttgagggaccctgggggtgggaggggctggctagtaggggacaagtgttcctgatctttctcccagctttcatgggaaggcatttggggggcattcagtgcagtgttggggagtcgggctttaggtgttggaagtggagagatggcctttcccctgggggggcatgtgaggggcctaggcttgagcagagggagactgggtctgggccccctgtgacgccgctgcctcccctggccccacagagcaccatcaatcagacgcctgtgaccctgcaagtgccgggcttgatgagctcccaggtgcagatgggcggccacccgactgaggtcctgtgcctcatgaacatggtgctgcctgaggagctgctggacgacgaggagtatgaggagatcgtggaggacgtgcgggacgagtgcagcaagtacgggcttgtcaagtccatcgagatcccccggcctgtggacggcgtcgaggtgcccggctgcggaaaggtcaggaggcctcgggctcagtgctctctcaccctctgcccctcctcttctccgcgccctctttcttcctctcttgctccctcaccctctccccctcctcttctccgcgcgctctttcttcctctctctctcctctcgcagcgcgtgcgtataggtgtatgccatcactgagtgccgccctcaggccgggccatgggagatgttggtgaccctgaggggtttgtggccctgtgggggcccaagacctgcaggcgagacagtagttggggaatgtagctctgtatcgctgtagaacttggccctgctcccccttatatggcctggcttgtgcaaatggttttgcctggtctgtggagtggggaagagtgccgggaacagtcccgagacacctgctggtgtctcctgtgtgccaggcaccctgccgaagctgtgtctgtgctcaccctgagccctccccgtagcccctgagccccatcgtggaaggagacaggcacagcgggggtggctcacactggcaggtttcaggttctcggagtctgatttcagactctgctaagtcctgtcacctccagcgccgtgacaggtgtaatcacctcacctctctgcctcatgagatggtggtggtgagggcgtgtgacctgctctttgatccccttgctgggtgtatgtatggaattcccatcgtaccaggctctgatctagacgctgagggttcagttgtgaatagaggtccctgctgtccgtgcaccctgctgtcccgtgcaccctgctgtcccgtgcaccctgctgtccgtgcaccctgctgtccgtgcaccctgctgtcccgtgcaccctgctgtccctgcaccctgctgtccgtgcagctgttagaggacctgcatgccgtattgagtcggggcaggggccgcattcctgggtgtactgttcgttcagggtggtcaaggtcaagaggtggcagtgagcaggtgagtgagcgaggtggtggggccagggctgagtggcaggccttggagggctgcctgggtcttggaacgaccgcttattttgagccagatgggagggaagcaatactgagaggcctccagggtggtcacgcctggcagatggaaatgaccccacatagtgaggttgggggtgggtgcggaggcacagcaggtacttcccctggccctggcttccctgctgagccctgcagggcaggatgtggatcagcaggagggcagagagggtgctgtggacaggagggcttgccgggagctggcagggttggtcttgccaaagcgatgccacagccaggtttgtcaggaccaaggctggctctgcagggccagatcgggcgtgggggccttcttatgtcatggaagcagctcggctttcccctggagttggtggccttttgaaggagaaaacaggactgtggtggtggcatttttgaggtgattgtggctgcagttgggaaaatgaatgaggtctcccgcaataatctggtgaaagatggtgatctgatttaaagtagtagcaggggatggagagaagttgatggatttgagggagacttgtgcctgggaagtgtccagactttggtgatgggtgtgggtttgtggggaggggaggagaaggcctatgagctgcttagtggcagctctgatggtggggatggcaggtgagatgcaggggtgatgagcaccttgtcgggggtgagcggggggtggggggcagctagctggctttgcggtttctgagacacccagtagagatgtcaaggaaaaattagctggacaggtctgtgttcccagcatgagggctgatggacactcaggtgtctgtcgaggccctgcttgggatgtcggagtggtttgcccagggagagcagggttggggagggcggctggagaggtggaaggagcatcttagaaaaggggcatggggaaggccaacggcatctcctctcactgcagctcctgcccactgccctccagagtccccttcccttgagctggtatgtcagggctgctcagggctgccctctggtgctgggatggagcttggctcaagcaggggctgaggaaacatttgtgggaagaaggaatggagagaccctggcctttggga[141 bp omitted]gaaaccccatctctactaaaaaatacaaaaattagccaggcatggtggcggtgcgtgcctgtaatcccagctactcaggagtctgaggcaggagaattacttgaacccgggaggcggaggttgcagtgagccaagattacgccactgcactccagcctgggtgacagagcaagacatggtctcagaaaaaaaaaaaaaaaattactgcattgtattgttttattcttaaattttttgttacatgtcttttcaaatatacttaaaagtagggactatgatagtgatacgtttttatcatagtatatgtgctaatattttggtgttccttcatctggcttcaagttaccaatattttgtcattcttaattttcatattcagcttatttctcccccctcctttttctttgctggattattttaaggcttatcaggtttatttcacctgagatccttaagtatatttctattatttctcaattaacattttgggtcagataacttctctgtgggggcctttgctgtgcgttgtaggatattgagatgtatccccagcctccacccaccggatgcaagagcactactccctgctgagacacccaaaagcatctccaaagattgctcagtgttccctggggacaccccccctcctccagttgacaaccactgctctaaccagataaccttaaaaaattgttttgtttttttaacaaaaccacaatagcatgattagatta[133 bp omitted]ttttgtatttttaatagagacagggtttcaccgtgttagccaggatggtctcgatctcctgactttgtgagccgcccgtcttggcctcccaaagtactgggattacaggcgtgagccaccgcgcccggccaataatttttttttttttgagacggagcctcactctgtcacccaggctggagtgcagtggcgcaatctcggctcactgcatccttcacctcccgagttaaagaagagtagctgggacaggcacccgccatcatgtctggctaatttttgtatttttggtagagatggggtttcgctatgttggccatgctggtcttgaactcctgacctcaggtgatccatctgcctcagcctcccaaagtactgggattacaggcgtgagccactgtgcccagccgaggatattttttatagtttgtttcagtaaggatccatatcaggtccctgccttgaatttggttacaaagtttgtgtaatttatcctttgtacctcactccctcttttttttttttgcaagctcttttatttgtagaagaaataagttcatctgctatatagaattttcagtgttcgtgtaggctcattgtatccttccctccctccattttcctgtaaattggtttaagcaaggttagaagctcgaatagatcaaggttcaagtttttaaattttattcaacctgggtttgaatcctaatttctgagcttcccttagttcacttattgttgggagaacatggctgttggggtggttctgggagcgcccaccatggtggctcgtgtggagtagacactcagcacgagggacccctcccccgcggtgagctcgtctaggcctcccgcctgcgctctatggctctgctgagtttctggcatgtctctattctttctccctctccatgcctatggtgtgtttatgctcttgttttttgatcctggagaatatttgggtgaactccaccaaacctgcttactaagggtccctttctgacacctgtggcgaagccccctcctccctgtcccttcctgccttcagtgctggggttgggtggacgctgactggctgttgggcgtgagccttgttcacaaacctgcctctcctttccccacagatctttgtggagttcacctctgtgtttgactgccagaaagccatgcagggcctgacgggccgcaagttcgccaacagagtggttgtcacaaaatactgtgaccccgactcttatcaccgccgggacttctggtagaggcggctgggggagggtgggggcagggctggctgggggcttctccccactcccgccccccccttatccccctctgaagacgatgggcagaggagtgacagccgcagacacacgacagccggcagcaactggaatggcagcaattaagggtggggggcgggggttggggggttggggggttagggcagggaggggactggggaagtgcgcacacagcccacacagacaacacgcacccacacagacacagagggaaggggttgggatggggacagggtgcacagcagggcggggtaggaccccagcccctcccaaaacagcctctccttctcccatagacccctttcttctccccttccccacggtaggaacatagcgtgtttatattttatggccaaactattttgaattttgttgtccggccctcagtgccctgccctctcccttaccaggaccacagctctgttccttcggcctctggtcctctctggtcccctcctgggtttcttacgtagttgatttttcctctttagtctcccccgacctgcgcccagccccgtggcccctgcccctctcctactctctgtggcagtttcatatttgctaagacgaatttgctcattaaacattttgttgtattttactttatggagcggctgtgtgtccagtatgtccgaccctcttcctcggttctgggctcgggtgggggttcccttggcaaactgcgggcccctggctgggacgcccctgctgccggcgccggcagcctcgaggccttccctgcttgcgcggtgcccttctcggggtcggcacaggcacagccccgggggacgtgaggttcccgagtgctctcccaccccgccgacaggagggatggtggccgagcgggccggggcgggcgtggcgtgggtgtgccaggagctccgcggttgccgccaagcgagctggagctgactctcggcgttccgtgagcaccgcgcggatcccccgctgcagcgggcggaagtgacgtagaggcgcctagcaacggggcccagcgcgccggaagtgatgccttccaggttggcttggctgcggaagcgactcctgccagggcggggtgcggcacgggagggcggggagcgcggcaatttccgcttccggtccgtcgcctccttctgttgcttcccgtctcctcggcggctcccctcccccgcccggctctccgcgccccttctgggcggcggggcggcggagccgtcggcgtgcggccctccttgcgttcgtgcgtgcgcccgtggcccggcgcacgtcccgcgacaccgaggccgagcggggcagggggctgaccgccatgaccccccagagcccggcgtgagggggccgaggtgagcgcggggcggagcgcgggggacgctggcccgcctgctccgggtgttcgggcctgggccgcggcgcgcgcgggctcgcgtctggccagttctgggtgtctctggcggcctttgtgtctctgctcctgtgtcggccttgactgcccccgtgtcggttgtctgtgtctgtctctctcgtgtctgtgtgtctgtcagcgtctgtttcctgtgggcctctgcctgtgcctgtttcagtgaacttagaaaagggtttggagataggagtgtgtttgtgtgtctgtcccgggtctctctctcctctgtctgtcgtgtctgtgtctgtcaggatttgttcgtgtctcgttgagtttccgagtcttcttttccctaggtgtctctagcccttccctgcgggcttttctgcctatggtgcaaatcttacccccgccccgtcttcgcatctgagttttgcccccatacctatcacctccaatcctgaagtttctttccaggagtctgttaacttgatctagaatctgccccttttccccagttttctgagtctctggtgtgatggtgaagagccccagccttggattcagaagcccggctgcctgctaagctgtgtaattgccaggtgatagtctctgtgtcaaaacctcagtttcctagtcgtaggaaatccatagttcgtaggcattcgtagttcctacatcatagggtccttgtgcatgtaagttgaggtgatgcttgtaaagtgcctgacggtatctgacacatagcaagtgtgtaattactgggagctctggtttttattattacagtgcttagagatttttacacagtaagtgttagatatcggtcggttattggagtactccttggagaactttgccatatcctttgtattctttttaatgtaagaattctctttgaatcaatttaatttgaaatacagtctcattctaagcagtatctgagaaatctcagctttgatgtgctagttgggtaattttttctaatgcacgccaaataagtacagagtattaagatagtgccttttctgccgccacccttttggaaatgttctctgttttttctctgataataatagcagccagtgttattgagcgcctactatctgtggggcacagagccaagcactgcatgtacccatcttatttaatcaacaggcctaccaggtaggaattctttcatttcagagttgagcaaactgtgtctcaaggaggtgtgcgctgcaggtagctgatgtggccaggatttgaacccacattttatattctttgccattagattccatttttcttatctcttatttctcagcgccaggtctctttttgtttctgggcctctttcttccttggcctcctgcctccctgtcttcccatgttcttgtatctgctgctgcctgtgtttttctcattgtgtctctgcctagctccctctgcccaggtttctatgtgtctctttctgtcagaactgtcttctatttcttctcagtccccttctctgcatttgttacatcatctcttcatcttaatgtattaggctggggctgttttgggactccagagagttactttttaactagctacatctgtcttcaggtgcctggctttctggcctgaggtggaagcagaggccagcctctctccgtcatccctatctcccctgggcttacatcatggcggggctttgaaaatctccctctgtggcttcttggagccgcatagatgggtgatcagagctggctctggaaccaggctgctccaggagtaaggtgtgtgtccctgggcaaggggctgaacctctgtgtctcagtttccaccctgtgaggtggctatgaatcatggggttgtttcaaggattaactgagttaatacatgtaaagcacttaaaacagtgcctggcatgggataagagcagtgcgagtgtctgctggtgtcatcatcatttgcttgactctcttgtttctcgtcaccagtctcgggatgggttaatttaatttaggttaatttaaaagtatgagttttggagttcaggtgggcctcgggttgagtctgccctgccattcctggtgtgtgaccttggttgaattatttaacttccaggagcccagtctttgcatgcagtgttgaaaaaggtaatgtccctcttgtgctgagcgagcacctggcacacagcagggacccaggcagtggggctgttaggttccttatctctcctgagccttgggcttccgctatccttgggacgtctggtcttctggcttccccggttcttcctgccgccctgggttggttccctgctcctgcctctgtctttaatcccttcatcagccttctttcccatgtgtccttgtttctgctgtggattcctgccccctctgcccttgttccagaggtctttcctgccctccctctccacttcctccttgcatggtttactgaatggtttttctgggccagcttctttgctgggaaaagccacatgcagacagacatgttctctgcccccatggggcctgtgggttgaccttagctacagaatcagacgagaatataaaatcatgagggagactgagtttactgatgaggccccagggataggtgactgtgatgtttgggtgtgcacctgggaagtgtaagcagagcccttggggtgagtggatatccctggatgaggaagaaggaagagcgcatgggcaggacggagggcctcctgatgcgctgccggtgtttacagggcgtcagttctctagatgaccgcatggagccccatttgacagaagagaaagctgaggtgcaaaagatccagcccgcccagggtggccttgccaggaagtgctgagccaggttgtggggctgcgatctgccactgcatatactctgcctcactgagcaggggccccagcaggaaggaggcagcctgtttgaggaactgaaacatggatggggttactttgagacctagaggttaacaagggacagagccttctgggccacagttaggaactcatctttgaccctgagggctctgggcaggccatgtcccatttgtgtttccagaggtcctcttcccctcgcagatgcggtgacctgccagcacctgccgcagccttcgtccgggagtcgccccatctctccacgcatcggggccctgtgccccttgctgctgcagccgggcaccatgtcgacctcgtccttgaggcgccagatgaagaacatcgtccacaactactcagaggcggagatcaaggttcgagaggccacgagcaatgacccctggggcccatccagctccctcatgtcagagattgccgacctcacctacaacgttgtcgccttctcggagatcatgagcatgatctggaagcggctcaatgaccatggcaagaactggcgtcacgtttacaaggtcagcatcctgctctcctccccgggcaggtgcaggggctcaggtgggaggacaggagcccgtgttgtgcaccctgcctgggatggcatcccggttctcaagaggaactggagaagagtaaaatctctctttttgtttaatgaaggcaacgaatataaggctaagaagtttggagccttgtggttaaaatctgtttttgagtgagtggtgcgtacgtaagattcatgtgctgaggaggcctgagagggcccacggtgcccatctcttctgtgtgcccagacacccagttcctttcctcacagcagccaagtttccgctctgggccccatctatgaatgcctctcaggcaggtgtgtgctccccgtggcacaggcgatgccacgctggggatgaacgctgtcgtgcctgtgagcaggactcagcgactgggttttcagtttgctgctcttggggtccaggggccttggcatccccacctttggtctttggttactgtgttcctcgtgttacggcaaagtggccaaggacatgggctggggccgggttatactcccagtggcgggatctcaggctcgtccctgaatctccctctgtgagggcccatggagccgattcacgtctgacttggggcaggggctggtgagtgttagactcctgctgttgcggtcccgtcggcaagcatctgcagaaggcccgctctgggtgtcttggtgcaccagaccaacaaggccccaccctcatgcgcttagacctgggcctgctctggcggaggtccctgtccttgctgatctttgagacttctgcctaggtgagggtggttccctccactcacagatgaggaggctgaggcctggagcgttgcagcacttacacatgggagcaggggttgaggctcgtttcctgtgactcgttttcatacccatcccgacacaccaggattgggttgagtcatagattgaatcagttattggtcatttattgtgaagggctgggtggcgtttgtttagttgagaatcttggaaaaccctggaggtgcaggtgagcctctctggaggcaacgaggagggatggggctggaggggtgggtgtgcagaggggatgaatccagaggggccccagacgcacatccttcctggtcagtggctggggtgatgctgctgggggcagacacagagtggcctgtgggcagggctggcaggtgccaaggcctgagagtctgctggggagcatgtggtgctggcagccagggtggacggcaggacagggcagtgcaggagaggggacgtggcctccagtgccaggcggggcttgggctgctttactgaggtgtaatttgcacacagtgaaacccagcctttcgagatagagttctctggattctgacagatgcacatatttcataactgtcatcacagtcaaggcatagaaggtttttgtcacccccaagacctcccctatggtttttgcagcccctctgggactctccccaggcctggctgttcctgctgtatccgccatccctgcagcatctcttgattcttgggactctcctttctatgatccccacagcagagcctgtaggatccccagcccatgtggctgaggacacggggttcccgctccaccctgaaccactggttcctcatgctggggtggggttcagcctcagttccccgggggagggttgatggcgtctggaaacctgctttggttgctgcttgtgctgcctgctggacactgtcctgagagcagctttgtgaggtcagcacgtgtcactgttgtccctgctgcggcatgcgccgatagctgagcataggcacagggcaggggtccaggagggggtccctgggtccacgtctagccagcgcctcccttcctggctgaccacttctatcccgcagtccccttctggaagtacgggtgatgaggacaaccccacaggcccagaggccctgagccactgtgaagctgctacaccccctttggccctctccggagccctctgtgctgacctgttctggcatgagggcgagtcctcttgcttctcaccatcccttcgccacatggtctcatcttgtcacttcagccccaggtggtgggttgtgcaggagcagtctttccactttgatggatggggaaactgaggcccagagacgggggaggtggcctgccgaggctcgtgggggagctggggcttgggcccatctgttcagagcccaggctgtcccaccctgtggccctgctggctggcactttgtgggccttattgtccccgtggagaaggagggtgagctgtgggggccttgcaggcctggctctgcacggcctccctgcatggccttgggggtgagtattggtgagtaagggccggcgtttatttggtaccttgtacgtgtagcacacacaggttctcatgaaatccacggttaccctgtaaaggaagttctttttctccttttcctctgttttccagatgagggaactgagacataaaggagctcagctctacctcgcaggaggtggtagagccaagaggagccccgagcccaccctctgggccctgcactgccacctcacttctgaggaatgcagggtctcagtcttggctttaaaccaggggtcagcaaagtacagcccactggtgaaatcccactcacagcctgtgtttgtaaataaagttttattggaacacagccaggcccattcatctgtggctgtgaagtagttgagacagagagtatatggcctgaaaaactgaaatgtttttcatctggctccttacagaaatgtttgctgatccctgttttaaactttatttctgcattgcaggatgtccttgataaagctgtctttaacattaagaaggactatcattttatgcagttgcccactgctttttggttgttttcagaaaagcaaaggagaaataatgacttattttgcaaactttttttttttttaacttttttagagacaaagtgttgctctgtagcccaggctggaatccagcagtacagtcatagctcactgagccttgacctcctgggctccaagcatggttgaggaatagctgggaccacaggcacacaccaccatgcccggctaattttaagatattttaaatttttttgtagagatggcagtctcactgtgttgcccaggctggtcttgaactcctgggctcaagcgatcctcttgccttggcttcccaaagggctgggattatagtcatgagccactacacctggcccacttgctcacttctaaaataaggttttaaatttttcattaagaagttgtatactaagcacatcatgaatgtataacacagctgttacgcatgtggacacctgtgtagccttcacctagagggaggtagaggatgcattcagccttccaggtttcctcaggagacctgtctcccacagcaccgtgtctgatttctgtctgccaagactgttcttgagctttatatatgtggagtcacacgcgtggtcttttgtgtctggcttcttttgctcaccatcaccatcaggtcagcaaggttgaccgtgctgttgcataaagcagttgttcatttattttgagaaagtctcactgttgcccaggctggagtgcgttgacatgttctcggctcactgtagcctctgcctcccgggcttaagcaatcctcctgccacagcctcccaagtagcagggatgacacgcatgtgccaccacgcctagctaattttttgttattttatttatttatttttttagagctggggttttgccatgtcacccacgatggtcttgaactcctggactcaagcgatccaccgactttagcctctcaaagcactggggttacaggattttgccactgcacccgattttatatatttatttaattattgtttcttatttatttatttatgagacggagtctcgctgtgttgcccaggctggagtgcagtggcaccacctcggctcactgcaacttctgcctcccaggttcaagcaattctcctgccttagcctcccgagtagctgggattacaggtacttgccaccacgcctggctaatttttgtatttttagtagagatggggtttcaccatattggccaggctggtctcgaacttctgacctcgtgatccgcccgccttggcctcccaaagtgctgggattacaggtgtgagccaccgcgcccagcctgttttttgttttttcttgaaatggagtttcgctcttgttgcccaagctggagtgcagtggtgctatcttggctcactgcaacctctgcctcccaagatcaagcgattctcctgcctcagcctcctgagtagctgggattacaggcgcatgccacaatgcctggctaattttttgtatttttagtagagatggtgtttcaccatgttggccaggctggtctcaaactcctgaccttgtgatctgcccgccttggcctctcaaaatggtaagattataggtgggagccaccatgcccggccttatttatttatttttaaatggagtctcactctgtctcccaggctggagtacagtggcgtgctcttggctcactatcacctctgcctccctgatccacgggatcctcccacctcagcctcctgagtagctgggattacaggtgtgcaccgccacacctggccagttgttttgtgtttttagtagaaacaggtttcatcatgttggccaggctggtctcgaacccctgacctcgggtggtccacctgcctcagcctcccatagtgccgggattataggcgtgagccaccacacctggcctcatttctcttttatttcagtgtatgtggtagtcccgctgtgtgagcgtgccatagttgatgtatgcatttcactgtgcgtgggtattcgcactatttcctgcttcacaatctttttagctgcgataccaaagtccagagagctctggaaacgaaagtgtttcatgatccgttcggcacaaagtctgacccagactgaagtgaggtcgttcacatggtgtctgttggtcccacagtagtgtggctgttggcacgactctgcccagcgcgttctcttatgtgttgtatgtgcgttattttcctggtctgaactcaggaaaattctgaattccaaaacacaagggccccaggagttgtggacctgggactgcctcttggcttggggtgtgatcaggcatagcaatggcttacctgctttcctttctttcgtgtaaataccttgagggccggttaaagactaatctctgattacactgtaaatactgttaacacacctttgaaaggccttgccagagctaggtccagctgcctcagagggtgaggagatatgaatggccctggcatctttcctggcagatttctccttggttcagacggagcttagctgtgatagctgactcttcccctaggagccctgggtgggtttctgtggctctgtgaaggccctggaatcccctgcagaatcaaagttgtgcctttttttgaggtcagtgaccaagacaccccctgcagagccttaagggggccatgactcctcaagcccaggacttgagcctgagctagggagagcctcagagaccttggtccccccgcccccactattaatttcaacttgttgaaagggagtttgttttcgtattataaaatacaaacataccaaagggtgcagattgaacgataatgttccctccgccctgtccttttgctcctggtggtgtggaacctgggtgcccctcccaagagagcccgggcctacacaggcccttgcgtggatctcttcccttcttgcagaggtgataaactactgctccaggctgttagtaccagcgtgaggttttacagtcagaaatacacatttcaaactagtactaagacccccttcattgtgatttaactaatgtggttttcttggccatgttactttagattttagttgtaaagaaatagacagggctccaggatgccaggcgatgcccatggcggctgtggtgcctgtagctgccatttcctcttttatttggattgagatggagctcctacactgtgcagcccccttcatatcgcacagttcagtggccttcggcccattcacagtgctgggcgaccacctctgtccagctccagaacgtcttcattgccccagaaggaaaacccatagccttcaggtggtccctctccatccctccctccacccctggcaacccacaatccactccgtctctctggatttgcccattctggatgattcacgtcgatggaaccgtaggctgtgtggcgttctgtgctggcgtctgtcgctgagcgcagtacctccgcggctggtccccgtcacagcgtgggtctgtgttcattcctttgcatggccgtgtcgtattctgtggggacagatgtgtgtccacccactggcgacaggtgggttgtgggccttgcgcccagtcggccgccccagagcccgcgtcgcaggcagtctctggcccgccttgtgcccggcgtgctgaccgggcatccccgtgcccgctcgcaggccatgacgctgatggagtacctcatcaagaccggctcggagcgcgtgtcgcagcagtgcaaggagaacatgtacgccgtgcagacgctgaaggacttccagtacgtggaccgcgacggcaaggaccagggcgtgaacgtgcgtgagaaagctaagcagctggtggccctgctgcgcgacgaggaccggctgcgggaagagcgggcgcacgcgctcaagaccaaggaaaagctggcacagaccgccacgggtgagtccctccctgcggcccctgacggcctagagtctgtcctccgcctactgcggctcccggcacccggccgcccactgctttctctcccagccaggagggaccgcggcatccccctttgcttctcctcacctgggccccttgctctggtctcacttgggccctttttttcccttagcacctcccatgcagcagctctgggacccttcctgcctcttgcctcgtgccccagggcaggcctagaattgggaacttttattccgctcccccataggctcagggcctgagggtgatcagtgctggggacagggctctgaggggacacgcacagtgacccccgagggtgctgtccttctctctgcgctgagatgaggggaacatcggagaggcagaggggggcctggaagaggcacagaaggaaggccagagccagggcctgcaggttgcaccaggcatctgggcctgtgttaggagccttgacagtgccttctggaggtggaggactcagtctggtgggtggtgaccagcaccgaaaacaaaacttgaaatagtgcatcccacatcgtcaagccaagatctgtcccacgaaacatttccagttatgtgatgggtgtgtgggtctcggactgttccaggaagtgtggtctgtgttggtcgggggctcacagccgtgaagaggctagtccggctgctcaggactgggagggaggctggagaatgtctgccaggctcttctgctctccaggaagagtggaggtgcctcagttagtggggatacgtgggatggggaggggctgctagagcactgccctggaggtggaggtgggtcagccaggccggtgcagacaggaggaagggcctgtggccctcgtggggtccggctcgagggactggacttgtttggggaagtctaggccttctgtttggacgggtctcatttgggatcacctttcagcacccacggggagacatgggtgtgacggggtgtgtgcgaccctgcctgggactccagagtagggacccacgagccagtagatgggcgtgaacgcagagagagagtgaagtggagggaaggaagccggtgtggcgtgggagtgctcagagccagggacaacaggagggagtgtaggcggcagagaggggctggtcagctcgaggcaggcaggcaggcaggtgggtggcggggttggggtggacggaggagggacattggcagtagctcggaggagagtgggagcctcaggtaagaggcctgagggtgggacatcctggctcgggggtcgtcagactttgtgcaaggccagagctaatgtcctctgcgttgctggccacgccttcccatcctagctgcctggccccgtccgctggcggttgctgggaagcagctgcacccctccgacactcaccaaggtctccgaaatttgaattttatgtagttttcacgtgtcttttttaagacttttaagttgttatttaattttttaagggtactctgaattttcgcccatcttggtgcattcttttcatttcttccaaccattgaaaaatgtaaaggcctttcttagaccttctcaggccagctgtggctgccactgtggtgtgctggcccctgtcttggagtgagttgtgtggagggctgtggctggggaggaggatgggggcagctagggagtgagccctgagaccctcagtgggcagggaagggcctgtggtccccgggcagcaccgaggctgggtgctctggtgatgggaaggcccgggtgttgctggctgggtgccagtattacctgtgatgtgggaggtggggccctcagggctgctgggcattggatttagccaccaccaggctggggggttaggggcatgtgcaaggtagaggttgggcaatggggtgtagattcccagcactcacctctgagagtccctagagcttaggaggaagtcacaggggcagggaagagcaggaggggccacaggggtgtggtcctccctgtgcgctggcctcacctgtgccccacgctgcccttccatctgcccatcccctcagaaggccgcttacccacccaagtccgtcaatccctgctggttctctcgtcctttcctcactcataaccccagatggtcacccttcggccccgctctgccacccacatgctccctggagcatcccatgcacccagccctgctgggcacaccacacgggggccagcctgggggcccctggacccggtgcaggtggggccgccagacagctgcctgctgcggctccgggcaaggggagccagggcctgctcgtcagggagaggcctgggcctggggagtgggttgggtggggacacaagtacaggacacaggtgcaaggcggcgtcttggagctggagcagacagaacttgctgaccagtgcacagtggttgggagggcggggcaggagaggcagggtccgccctggggctttggaggctggggcaatggccctgtgctcggcgggcctagggcctggttggagcctgtcctctgcactgtggaggggggcaagggtccacaggccttgggggtggagagaacagtgtcaggacagagtttgagggtaggcggggttgctgagaggatgctgcagtggaggccggggatatctcagcagcctcctggagggtccggccctgccttcctgtgtcctctctctcccttcccctcctgctcttggaaccaagggctcctcgctagcccactccctaaccccgactaggccttggatcccgctgtctcaatggatgctgttctcccctctgaattccagttgttccctgccagagctaccattctcaacaagccctggaaacaggcctgggaaacctgggaggaaggacctcccatcccccaggggcccagggacagaccccaggcacgcggagagtcctggtggtggcagggctcagaggttgctggggttccccacctgcttatcagactgacttttgctctggtccttccctgatgcctggcccctcccgtgggtggggctgcctgcatccccacccttcctcctctgagcacctggcgtctggtctccgcctctcagtcctagtcttggcctgcagaggttgtagggtgggggacttggggggtggggttggacacagaagcccccgtctgtctaggctatggggtttcctgtctctcgttccctggtctgggtctcacgcgtttctcacccgccctccagcctcatcagcagctgtgggctcaggcccccctcccgaggcggagcaggcgtggccgcagagcagcggggaggaggagctgcagctccagctggccctggccatgagcaaggaggaggccgaccaggtactgggcgtgcagctggggctgtctgtccgccacccgcctccacgcctcacttcaggctccctcccagccaggcgtgggcctggccctcactgtcgctgctccacatgctgtcactcgtctcctccccagtcctgcctcatcctcaccccgccgtccctctgcgtgtcactctctgcctgtccctcactggttcagggacccccagccctctctttcttcggctctatctgaccctggctctgcctctgactctgcctctggcccctcccgtcatgcccctcacactctctctcccccagcccccgtcctgcggccccgaggacgacgcccagctccagctggcccttagtttgagccgagaagagcatgataaggtcagagcagcctccctgtccctgcccctgccaggggctcccctcagaccagccccgtcgccccttcctaagtcaccccccaccatcctgctgggcccgaagcccacaggctcacgcgtgttgaaacctcagtaccttcagccgtaggatgtaggaccacaagtcagacagagcctgggtggtggccagcacagctgtgccaaggttgctcgggtgaccagggtcccttcctccccccaacgcaggagataccaccgaggcgggtgcccgtcctccccgggtgcgccagcacagcaccccactccccttatcccctgtcccgcctgacctttgacccaggtgccccatccccatttcatacattgtccgcatcccatcgaatccttcagccgctttcgttggggtgggaggggttgctggggcttccaggctgaggtggcatctgcccgtggctcacgttctcatgtctccctggtcgtgcccgtgccccaacaggaggagcggatccgtcgcggggatgacctgcggctgcagatggcaatcgaggagagcaagagggagactgggggcaaggaggaggtgagcggggcttgttctgccctccctggcccctgcaggtgtccgtccgtcccatcgctcattcctgcgtggccaggtccctggagcagagactgaaacacaaggtcctggagctgggcaccgggtttccaggcttggtcggcctctctgtgcctctccctccctgctgggctgaggccggtgactgaccaggctgccctgcggccacctcctgtggtcagcgctggccatcccccttcgggctgagcaccgtgagggccaccaccggccgccacagctgaatggggaggcccagaataggccaacagcctggcatggccacagggaggagggtgcagggctcgccccatctgtcacactttgtcgggcacctccttggtgccaggccgtgtgctgcacacccagggcctgttggtgagcgaggaggcatggtcccgccctcgcgaacactgtttctgtggcgtccccatgctctgcagctgagtagcaaaccctcccacaaccttgtgcttccaggtcacgcttcagtacttccctgtgacgggcccgctggctggttgtttcgtgtcatggctgaggtcactcatgcctctgggcccggggtgtccgcactggccttgccctccagcctcctcccctggcctctccctggttactagtctgtcctgagtgtcctcatagcacagtagctgctgctgctgccgccccccaggacaagctcgtcgggctgggttggagttgcctcgtcagcctgtgcactgctattggtctcagcaggtcctgaggccagcccaagtttgaggggtggggacaaggcctcctctccatgggaggcggcagacagcttgtggccataagtgatcaggcacagtgggactttcttggtagacggaaagcctctttaggttggcctcggccagggggtctctatcagtgtccaccacagcccagtgacccgagtaagggctgccctgctgggggagcaccagatctcacccatctcttctcctgccctgccctggactcagctcttctccccttcccatccccgccggggcctttgcctcacgggtgctgactggagatgtgtgcatgagtatgttgggggcatctgcacgttctgagacgggctctggttagctgggcccgtcgtgtgcccacttccagaacacaggaccatgcatgcgtgtgcgtgcggcatgggaagacctgcagtgcgatgactgcggggtgacagtggggcaatgggcgtgggaaggcctgcagcgcgatgactgcggggtgacggcggggcaacgtagggggcatcgtgaggggtgctcaggttgacctgagtgggttcatggggggcttcccaggggaaggcatggagcaggggctggccagtctggctggagaaggcacggtgggcagagggaggatcgagctgcttcgggtcgagcgaggggagggcttggcctccatcctcagtcagggccgggcaaggacctgggagcaggtggagttaaggggctgccctgctgcagtgtggagaatggatgtggggcaggagtggggctgtgttggggctccctggtggtaccctcgggtggggtaggtgggcaggggtgggccgaccccatgacggatgaggagggaggccaggtggtgtgtttggggcctgcctccctctcaccccttatggatggctgctgtctggacacccagggcctggccgcctcccccgccacgggccccagcttggtccctgtcccaggcttcccaccacttcttcatgctccttctcttctctctcccccacagtcgtccctcatggaccttgctgacgtcttcacggccccagctcctgccccgaccacagacccctgggggggcccagcacccatggctgctgccgtccccacggctgcccccacctcggacccctggggcggcccccctgtccctccagctgctgatccctggggaggtccagcccccacgccggcctctggggacccctggaggcctgctgcccctgcaggaccctcagttgacccttggggtgggaccccagcccctgcagctggggaggggcccacgcctgatccatggggaagttccgatggtgagtgcgtggcccacttgcatgcagcccctacgcctgtgtgcacctgtctttggttgactgtgcccttggacagggacagatcgagccagtggcgccgggcagtggtggggcgtcctgggtgcaggggagggggcaagggcgggggtcagatgagagcccagcacagggtgtgtgagattgtgccttggaggacatggggggtgtgctgtggggaggggatggcagctcagccgaggggcagagaggctctggccaaggcagagcgtgtgtgacgtaggcatctggggagggcggtgggtggagctgggaggtgcaggtggagaaggggcctgacacccagctggacaggggaggggtggccgagccgtgggagctgagggagggctgggcaggtctggcagaggctgcggggaagcccctcaccccagctggggtcccaggggcagagcctggcagagaagcccagttggaatttgagtgtgtgtgcgggaggccgggtggggtgggtttctggggggcaggggggcttttgtgtgaacagccacagatttggaggcaatggtcctccctagccatctgggcagtcaaggttgccagcccctcatgctcttctgtcctcacccaggtggggtcccggtcagtgggccctcagcctccgatccctggacaccggccccggccttctcagatccctggggagggtcacctgccaagcccagcaccaatggcacaacaggtactggaatgggggtgggaatggagccccgggtgggagtgagtgggagaagttagtgttgagtgtcctaagggaggggtggacgcctggactggaggtgggggctgaggcggggccccagggaggggctgagcagaacatcctgaccccacagcagccgggggattcgacacggagcccgacgagttctctgactttgaccgactccgcacggcactgccgacctccgggagcagcgcaggtgagcccctgccctcccctgcccagtggcgagagggagcctcccctagctcttcgggagccccgtcccttgctgtctttgtcccactccaggcagggccggctggacttagggatgaaaagttcagttgggtagagtgggccagaaccatccacctgtctttaaaagaagtgtgcatctttattttagagaaattgcagacttagagaaaaactgagaattgttctcaaggtttcccacccgaatgttgacctctgacccgtctctgcctccacgttgcttgagtgccttgcaaactctccaggtgtctcaaagaacacggactgtcttgtcctgtgcagtgagctgcgtggacaggggtttggaaggcagccgaggctccccttccgggtcgccactcacctgctggtggctcctgggctggccagggtgcgtcctcatgggtgctgcctttagctgccctggctccttggggttttcagctggcgtaagctggcgcccatcgccggtgacgggcccatctgctgagtcctgagtggctcttcgtcaggagtgcccgaggtcatagtgggccactggtgcttcgccgcggccctcagctgatacctgtctgtcccatgatgagtcaggtcagccttgatctcttatttttattttaagtgagctgttagtgaagagcaggttgtggtacagaaacctgtttccactgatgaaaggctggcagcttgcagggagtgagctgcacccacgcttccctcctctcattatctaggttaacgtagagcaaccttccagcatgcagttttccttcttttaggcccttttttgtcccatacaaatgtgtgcattttttcaacattaggtagaattcttaaatctatttaaaaggaaaatcaggccaggcgcaatggctcacgcctgtaatcccagcactttggaagctcgaggtgggtggatcacctgaggtcgggagttcaagaccagcctgaccaccatggccaaaactccgtctctactaaaaacacaaaattattacccaggcatggtggcgcacgcctgtaatcccagctacttgggaggctgaggcaggagaatcgcttgaacccaggaggtggaggttgcagtgagctgaggttgcgccattgcgctccaactggggaaacgagcgacactccgtctcagaaaaaaaaaaaaaaaaaaaaaaaacagaaaatcagacctctagccaacagatgtcttcacgctggcccggaacacgtgtctgtgctgtctgtccacttggaagctccctctggggctgtgtactcaaggagcgtctgagggcaggctcctctgagcctggaggcacctgtgaacacgcccccgctgccttcccccgcgggcctatagaccctggacggccccaccctgaagcagttgctgccctctggttgtcagagggtgacacctgcttctgtcatccctcttgtgtttgctcactggaatcagacccaccttatgggaatctgggctgacgtgaggttttggcctgggcaagcgatgcttccgctctgcacctcagttcctccttcccgaggcctctgggcaccgggctctttgaagcgccccctatgatggcctatactgctcccgggttggagcctcactgctgtctgccctgtctgagcccctctcccggatccttccaggagagctggagctgctggcaggagaggtgccggcccgaagccctggggcgtttgacatgagtggggtcaggggatctctggctgaggctgtgggcagccccccacctgcagccacaccaactcccacgccccccacccggaagacgccggagtcattcctggggcccaatgcagccctcgtcgacctggactcgctggtgagccggccgggccccacgccgcctggagccaaggcctccaaccccttcctgccaggcggtgagtgtgggcccatcacctgctcaagtccttcctgtgggttccaccagaggaggtgcctcacggggcagggacacttcgccctttgcctgcacatgctggatggacacaggtgggctgcgccactgactccactccgtgtctctggtttactcttcctgcaggaggcccagccactggcccttccgtcaccaaccccttccagcccgcgcctcccgcgacgctcaccctgaaccagctccgtctcagtcctgtgcctcccgtccctggagcgccacccacgtacatctctccccttggcgggggccctggcctgccccccatgatgcccccgggccccccggcccccaacactaatcccttcctcctataatccagggcggaagggggcctggctccatccggctgccccattccggctccctgggagatcagtgttgtgagtgcatgtgaaatgggggatccccacccccagtgcccttccccttcctggggcccactcacactacaccctcttcctttcccaccccacctccccggagagaaactggacatggggcctggggaggggagctggccagaggaggacccctttcccgtggcattagaagggggaggggtggctggggcccccacccattccccctccctccaaactcccaacccccagtcagtgtttgagcctcctcgttcccctcacgcacccgctcacgcaccctcggtgaatccttggtgatgattttggcaactttgggaataaatggcaattcccacgggcttggcactcccagattcccatctgtgatttcgtgtgtcccccagagccccttcatccagggacccagggctcaggtcacatctctttctcgggggtggctggcaaccagcccctctgtctcagaagccctgatttccctgaccctcccaggtcaagggatggctgggttgagggtggactgtgcgaggcctggcggagctgtagcccacacaggtccaggtggtcgggaggccactcatggccagacgcttccggtgcaggaggccttgctcttgtgttgaggggacaccaggatgaggtcagagagtgcactggggttcagggaggagaagaatcctgagagatggcacatgtgcaacacaggtcaccgtcgccatcgcccgggcccaccgcaagcatcactaatccatccctgcactcctggaaagccgggtcagcctctgccggctgagctgagtggaccaccaggcgcctcctggttgtcctctgtgtgctgttttcctctgtgtgctcttgtcctgggctggaccacacctggtgagactatccgggagaatcctcgggccgccttgtgaggggggtgttgctgtcatctccagggctaggtgacagcttgttgcaggccccacagccagggcctcagggatggggatctggccatgtctgttttaagccgaacaggctgttcttccatgtggagtctccctccgtgatcccctggggtcaagtcctgacggctgggttcgctccctcagtgactccgacagctcttgtctcagaggtgctggggtgaaggctgtgtggggccaggcccctggggtcagacttcttgccccttctgcccgggggacgctctgggctcagggtggggccagacagctacatcacagggacacttgttatgggtcggggtccagggagcacccagccagtggagtgttggaggccactgagagggacatgactgcggtgtccgagcagcgtcgtggccaccctgtgtgcccactccctggtggacagacctacgtcacctggggattgcagagcaaaaggagtgctgttggggtgatgtgaggttggggttctgtttcttgctgtgaattgggtcatgacctgtgtcggagcgttctctggcctccacttgcccctgcagaccagggtgtctggagggttgtcgggggcttgatggaggaattgctgaccacaccatgcaggaagaggtgggtcccagggacacaggaactttggggtcagccggttccagattcagttgcagaggagcatcccccttgcttagccagggaggggaagccctcttctcacacccggcctgggtatgttgtgggagagtcatttcccaggaggaaatggggactgttaccgggggagggggtgctgtccccaggcagcagcaagcgtcccttacgcttgggctgtccgagaccctgctgctctaggcggttgtgatgggggagccccacagggcacagagagccagctgaaggcggcagctctgggtgggatcacatggaaaggggaggcgagccgagcctccctcttgccaatcttggtctccccacagggtcatagctcctgggcccctcacttgtcagaccctccattcaccaaattaaggataagtttcacgatttcgcactgcggagcctgcactccctttctcttcaaaaaagctgaggacgaagataaaatgatacagttggattagtccagtggaggggttaaaggtgtgaggctttaattctccccaccatttcctcatttggcaaaacagagaagacaggattgaaaaacaagacaaaaacccagaggcttgcacataaatttggggcttaactacagcatcttcggcatcttcttttccctacagtgcgaattacaaagtagcaccacagatctcgtgtctcctactttattcctctttctagaatattccagccaccaaagtgctcagcaggagctgctgtgtaggagtcccccatgaggcccaagcacctgagcttagtgacatacacggttgaacgctgggagaatgctgggagcctgctgttgtccccgattgagggctccccccactgtgtgtgtatcactctttctacagcagatgtgtctctctccccacagtgggatggcgagcttgttaaatggccgtgaggaagactttattcaggaccatcgagacaggtacaggtaccatcagtggatggaaaatcactaagagcaaacctcaggggtccgggggttttcggctaaacccacctagcaggattcttgctgaaggcaggccagggtgatcagaggtcacctggggatggtggaggctgaagaagcctatcagatgtgagggtggcgggggttgggggggatggcggcggggttcatttgctgaaaggattttacaagggcatgcacggatgggcctaggaggaggttcagatccctcaggtttggctaagcaagagtcatggtggtgctcccggctggctctcaggagcagatgtgcttctgacccgacgtcttcccccagagagggctgaagtggaaaaaaccccagaatttctccctgggacaggtgaagcgatggggcgtgggacattcctgggtctcgactctgttcagggcctaggggttgggtggggaaggcacttgagggaaccttcctggagcccgtaggagcttcatccgagctcctgggtcaccccgcccaccagagtccaggcccaccagagtcccctgccacctgtgctcaccctagccttacccctcgctctactcccgccctcgccctatcctcgctcctcgccctacgcttgcccctcgctctggagctgcgatgccagcctcagggctttcagtcctgccttgatctttttttatactgaaactcaattttacacacacaaacccactcccagccagcctctgccttttgccttttcctcatgttctcattgaataggaagaaatgcccttttttttcccccctagaaggagtcttgctctgttgccaggctggagtgcagtggcacgatctcggctcaccgcaacctccacctcccgggttcaagcgattctcctgcctcagcctctcgagtagctgggattacaggtgcccaccaccacgc[178 bp omitted]gttctagggtacctatgcacaacgcgcaggtttgttacatatatatacatgtgccatgttggtgtgctgcacgcattaactcgtcatttacattaggtatatctcctaatgccttccctcccgcctcccccaggcccttagtttgtgctgctctgcgttggttttctgcgtgtgctaaaaggggagggagagtttctgtgcccattcccaggcaccttcttgcagccgcaggcatctcccccacacgtgcttctagcttcccgggtgtggcgtgagccattgcgtccggccagaaatgttttatttcttgagaacttgtctgtctctgtgatgactgtgggttgtccagctcatccctcaagcgccatcctgccaggcccttcactgtggtgagaaaccggcctactcacatcacaggtgcccctggagtttctcaaactgcagcccaaggattggctgcttgcttttgtaaaaaaaaatgttttattagagtgcagccacggctgcttctgcactacagtggcaatggtgacattgagtgtggcagagaccgagtgtcccttgagcctaaaatatttactatctggctcttcaacaaaaagtgtgctgacccccggtgattgcttgtatgtggcaggggtctaaggcctgcctgcacgtcctgggacagcccacgcttccacagggttccagcatgctttccgccgagaaatcgctccctttgctgtttgttttgtattgaatgtttcttcatgcttttgttttactttcagggataattatataatgttatgtttcatccacattattttagtatggatatttataatttcctaaagcactattttttttttttgagacagagtcttgctctgtcgcccaggctggagtgcagtggctcgatctctgctcactgcaagctccgcctcctgtgttcacgccattctcctgcctcagcctcccaagtagctgggactacagatgcccaccaccatgcccagctaatttttttgtatttttttagtagagacggggtttcactgtgttagccaggatggtcacgatctcctgacctcgtgatctgcccacctcggccttccaaagtgttgggattacaggcttgagccactgtgcccggcccataaagcactatttaatgactgctccataaatacaaacttcctttccttattattattatttattttttttttgagatggagtcttgctctcgtcccccaggctggagtgcagtggcgcgatctcggctcactgcaacctccgcctcccgggttcaagcgattctcctgacttgggactacaggtgcgtgcgaccacagccaactcatttttctgtttttag[153 bp omitted]aaaactatagacaatattatcataaccacccctgcaaatgcctcactcgtgttcagccatcatttacatttgaaccactcctgtttcacctacagcctcctcatggcccctcccctggagcacttaaaaatggtaatgacatgctctctagtaatcgttgtgtgttactgtcaaaaggtataactcatgcattgatgggggtaacccctacagcagttaaccctgcgtgctcagaggggaatgaaaggtagctcagaggctcgggaggtgaggttgcaaaatggcttgtgttgtggggaatgttctcatccacccaaatcaagcatcactacatccatccgcaggggaggcaagcttagggcatcacgtccaggagtggccaggtcccgatgtcacggggagccgggctgggacaagctccagacggccagggtggtgtgggtttgcagtgggagggctggcgcgggggccctgagggctccctggttcccatcttatcaagatgctggactcggtgcttgaaacatgtcctgacagccacatgaaaagggttagaaatgatactgtttcgcctgggtgctgtggctcatgcttgtaatcctagcactttgggaggccgaggcgggcggatcacgaggtcaggagttcgagaccagcctggccaacatggcgaaaccccgtctctactaaaaatacaaaaattagcctagtgtggtggcgggcacctgtaatcccagctacttaggaggctgaggcaggagaatcgcttgaacccaggaggcggaggttgtagtgagccgagattgcactactgcactccagcctgggtgacagagtgagaccctgtctccaaaaaaaaaaaaaaaatgatactgtttcctgtatttttttctcttagtatcttaagaaatacatgatttgaacaaggaccttgtgtctcctctcccctttcccggactattctgaccccagcagttctcagaaggagctgacattaatgagaacttctccctgttagacccttaaaatactgagctttcgggaccctgcctggcttgttcctgtaaaacggtcttgtctgtggtaaatactaaggtttttggtctcacagccgaggaaatcaaggatgtggatgcacacagagtgagatttggagcaggagtttaataggcaaaaggaagaaacagctctgtcacagagacgggtcccgaacgggttgtgaagttgtagaagaaatgtcaggggttttatagatgggctagtgaggaggggtgtcttttcttcctagggcctgaagaaccagttaggaccaggtgtgctgtctgcatcgagcagag[136 bp omitted]gtgcctcagcctcccgcgtagtcgggattacaggtgcatgcagccatgcccggctaattttgtatttttagtagagacaaggtttcaccatgttggtcaggctggtctccaactcctgacctcaagtgatccgcctgcctcggcctcccaaagtagtgggattgcaggcgtgagccaccgcgccgggcccccaccccattctttgatcctgcaggcaggcccttcgtttgtgctgctctgcgctgctgcttatctgtgtgtgctaaaaggggagggagtgtttctgtgcccattcccaggcaccttcgtgcagctgcaggcatctcccccacgcgcttccagcttcccttagtgtgcctaaagaaagggaaaggaatgtgctttaggcccactgttttcactggggcccatctatgtatgtggcttggtgattacccaggaacctcccaagtctgtgcccgagttgcttatctgtgttttacagcctgaaagatcaggctgctctttgttaggagaagtgatttctttgaactgcgtggtgtggtgagaaagggagcaatttctaagctgctttttgttaggaagttttttgctggggactctcttcgccctatctacctaaatgatttctgtttcttacatcaattgggtattgatttcaggtagaatgggtgaatgcatttattcgttcatctaagccgcatttactcctttcttttctttcactgttgttttttttttgagacggagtcttgcactgtcacccaggctggagtgcagtggtgcgatctcggctcactgcaagctccacctcccgggttcatgccattctcctgcctcagcctcccgagtagctgggactacaggcgcccaccaccacgcccggctaagctaattttttgtattgttagtagagacggggtttcaccgtgttagccaggatggtctcaatctgaccttgtgattccgcccacctcggcctcccaaagtgctgggattacagccgtgagccaccgcacctggcctctttcagttttgatagcagattatttcctttggccctgcgtggtctctctctggctgggcagctctgggccagccataaatggaggggagggcgtgtgtgtggccacgtgtgtttctgtcctggacaacactgtccggaggggcctaagtgggaagtgccctcaaccaaggagatagctgctgtgtgtgtgtgtgttgtgtgtggttgggacagtcggggattctcacttttttttaaaatttgagatggagtttcactgtcgtcacccaggctagagtgcaatggtgtgatttcggctcactgcaacctctgcctcccgggtttaagcgattctcctgcttc[135 bp omitted]ggccccccaaagtactgggattacaggcgtgagccactgggcgcagcctgggatcctcactttttcgcagattggtcactagcagggcgtctgatggaactttctgagatgccggaaatgttctctgtgctgtacaaaagggatgccactagccacatgccacgtagaacagttgaaatgtggccagcatgagatttttttaatcttgccaatttttgatggatttaagtttaagcacctgcgtgtgagcggctaccgcgtgggctgggattggaggaagctggaaagcgctcccctgcgtttcggctgctggcccagcagagggcgccggagagcggacggagccgcaggcggggttgtgggaagacgctgggatcccgtgcgcgcttgtgctccttccttctgggccagcgcgcagactatcaaccgaggtattcagtccctcggaaacccagttcctccgtttccaggcttctcgcccacacggagacagtcgctctcacacgtacctctcgcgggctcttactcgtggtcccggtctcctcctggtccccaccttccagcccagcgcgcacactagacggcacgtgctctccacgctctttctccagcgccccttgctcacccgccccccgttggagtggcccatcctctccgcttagacacctgcagtcactgtcactagctgaactgcgccctcctgaaagctctatgttgaaaccctaccccccaccctgcaccgaccccgtaccccagaatggggctgtatttggagacagggcctttacaaggtaagtaaggttaaaatgaggacattagggtgggtcctaatccaatctgactgttatatagtggggttgcaccttcatgtgaggacgccgggagaagacagccgtctgggagccaaggagagaggccttggcggaagccaaccctgcagcaccttcatcttgaatttctggtttccagaactgtgagaaaatccattgacgttctatagcgctcccagctggcggtactttgttatgacagccctaacatgaatgcagccatccacactgtctgggggaaggcacacacaccccacagcacccttgctgtctcaccccgtatcgcaaaagctcacgcatgtgtctctcccgagtccctggagggtcctgccacctacatctctctccttggcctgccgcctgtgatgctcctgggccccctgctccagcaccgctcccttccttctgtaatacagacaacagagacaggagatggcctggccccacttcatttctgttccctgggaaataagcatcgcaagtgatccgtagaatggtagacatcatccacttcccaagcatctctggctgaatgctgttctcatccacttcccaagcatctctggctgaatgctgttctacacatgcacgtgggaggcaccagggagcccagaagaaatgaaaagcctgggcagactcgcagttctgccacacagtgaatgtgctactcaagccactcagcctgggctgcagaggttggaagcctcactggcctgaggtttctgagtaagctctgacccaatcattgactattaaacttcagaggtccatggagacctcttaggagtctttgaaggaacttagcatagataccgatagctgctgactgcagggagatggggagatatgttttgtaaacctgtccaggcaacttttttgcctacggaaacacacaaaaacgaaaacaaaccaatgaaaaaaacctctcagaacgatacagaatccagagccactacaacacatttcatgaagtggcgtgagcctgtaattccagcagtttgggaggccggggcgaatggatgacttgaggtcaggagttcgagaccagcctggccaacatgacaaaatcaccatctctactaaaaatacaaaaattagtcatgcatagtggcatgcacctgtagtcccagctactcgggatgctgagatgggagaatcgtttgagcccgggaggtggaggttgcagtgagccgagatcgcaccattgcactccagcatggacaacagagcaagaccctttcttagaaaaaagaaaagtatccccgaacattatcagagtcaagttaataaaggccaaaggtagagaaaatcttgaaagtatcgagaaaatgacatgtcaatcataaggtcaggttcttcaacagtcatactgacattgtggctggaatatttgttgttgtgggatatatatatatatatatatttagagtgttgtgggatatatatatatatttagagacaaggtcttgctctatcactaaagctgcattgcagtgtgtgatcatagctcaccatgggattcttgattttcagtgagtataaagtgtaagacaaaataagtcttagttcaggtatgctggatgggaagccagaggtctgcatagcagttacaaagaaggccttattatctggaagaaaagggaccatagaatgtccattggttggggaacaacccagctttagtttttccagattctctgcatgtgcaggtttatgagactggagaactttgatttcttcttcctcctcctcctctcttttcttcttcctcttcctcctttttctcctcctttcttcctttatttttctttcttcctttcctcctctttcttctcctttttcctcctcttttcttcctttcttctctttttcttcttcttttttttttttttttaaaagaccgtgtttcgctctgtcacccaggctggaatgcagtggcgtactgttttagaaaagtgaaagagggccgggcgtggtggctcatgtctgaaatcctagcactttgggaggctgaggcgggtggatcacctgaggttgggagttcgagaccagcctggccgacatggcaaaaccctgtctctactaaaaatacaaaaattagccgggcatgatggcagatgcctgtaatctcagctcctcagtaggctaaggcgggagaatcgcttgaacccagaggcagaggctgcagtgagccaagattgcagcattgcaggaaagagagaaaaaggagggaaggggaaggaaaaggaaagaaagaaaagaggggaagggaagggagagatttaaaaaacaatagtaaagagagatttaaaaaacaatagtaaagagagattaaaaaaaaaaagtaaatgggccaggtgcgatggcttgtgcctgtaatcccagcagtttgagaggctgaagtgggaggatcacttgaagccaggagtaccagaccagcctgggaaacatagtgag[133 bp omitted]aaaaccccatctctactaaaaataccaaaacaaaaactagcagggcatggtggcgcatgcctgaaatcccagctactcaggtggctgagacaggagaatcacttgaacccaggagacggaggctgcagtgagccgagattgtgccactgcactccagcctgggcgagcaacagagtgaggctgtctctcaaaaaaaaaaaaaaaggaacggtagtgtgcacctgtggtcccagctacacaggaggctgaggcaggagcatcacttgaacccaggagttcaaggctgcagtgagctatgatggcaccactgccctccagactgagccaaaaagcagaccctgactctaaaacaaaagaaagaacaaataacaaatgaaaataaatacccaaaaaccagtcaaatgtgaaactggtgtcaggggtatgttctccatgttgagccccttctgtggaatatgacagtgtctctatttcgggtaaaggaaagaccaaaataactttccaagatgaaaagctaagagtgctgatctcatcacagacatagccagctcttcagttcagaccacctggaaaccctccccatgtcttttcagaacaatgtcctaagaaccataggggaagtggccataaaaaccatctttcctttgcagactggggtggggactctggccaatgccattctgttcttccataatatctttcccatcttgactgagcatcaaatgaggcccacacacaagattctcacccacatggccgtggcaaactccttggttcttctttccactggaatcccccacacaatggtgtcttttgtcctatggaaacccttgtccagtcttgagtgtaaactcgtgtttacaggtcttaaagtcctgacctggtgatccgcccgcgtggacctcccaaagtgctggaattacaggcgtgagccaccactcctggcctatgccagcattctttaaagttgtgggaaaaggccaaaagcaaatagaaaattgggcaaaaaagttcataattgcttaaacatatggaaaacctggaagtaaaattaagcaagtaagtgcgagcactctacattgaagattatagaaaattcagcctcccaaatatccaaagaatccaggagtgtgccaagagatccaagagtaggtccacaatttctcattctcaggagaatctgagattatatttcaatctaatgataactgattatataatccaatttctgcatcatcttgcttttatgttttgtaataaaaattttagaccaggccaataaggcatcagcaatttaccgtagggaactagggaatgtttaattatgacaatgaagtgtttaatattgtgttttgaaatataaacagtgtagatatatttgaataatactgaatttttagaaaaatctattggggtgtcatatataaaaggataagtagagatttggaaatgcttttttattggacaagaaaattgatcaaatcgaaatctggacaaactagaaagtctggatgctagcaatacaatctatagacacattctagcatcacttctgtgtcagaagtatccggattgtggtgcctacaaatgcatgctcctacacaccaagacatccattaagaaaataaagccatgctttccagagcgtttagcacttgtttaacgtacttgtgcttctaaatatcacaaggcaggatgggatttctaaagacaaggggatataggaccgaggcaaagacaatcagcatgtacactgaatcacactccataatcatattgctagaacacttagggagtacctctgaaatcacagccctgctgccatgatgtgcaattacaggatagaggtgccaggtgaaggtcccactgtggccaaggaaagcctttgtgagacgactacttcagggtgttccccatcagaggagcacacccctgatcttgtattcctcgtcaatccaaggtccatgtgaaatggtcagatggggaattttttcttccacagacatcaggatcttctgagtttcttcatcaaagccagatttgtgcagcctgggaaaatagaaataaagtttttttttttgtttttcatttttacacagtattgcctctctacattctgatgtctacctctcctctcctctttattctttcctagaaatcactgggagaattgtactgaatttgaaaaacaagcatgaatctttcctataggataggaagcctctgatttataccataaagtgaaatttcatatacaggatgtatcaattaagatttaattcaaaaaagatgaatttaagttaaaaagaaaaacacaggataacttccattcatctgatgttcatatgccctggcacatctattgcttcttataatgtgcttgcttaaaaaaaaaaaacatgagcttttctcagagacactaatataatgaattcatgtacccatcaccaacttctacaattaccaatattcagcctcttccatttacaacctgcccattttctaagaaataattaaagcacatgctacacccataaatatgtcaaacgttcttgtctgttttcgctattttcagttcctttcgtgtcattgtcccctgaacccacctcaacaaagctggtttttgtagtcaccaataacatcaatttgttaaatacattctatcctacttacccagttagcattgaatacagttaattacactttcttgtttattttttcccttagcttactggacacgacttcctcctggcttctactccctcaacagctatcgttcttgctttatacgttgaatctctgtctctttataacttctaaatgttctcagcatcaggaaaatataaaaaataagttcacaaataattggtaagactggaacataggccttcctgaaagaatataactaacatttgcaattctcttctcccctctcccgtgtccttccttcttgccaggtgttcatagttatatgcctttttatctccaattataaaaagaagttgaggaggattagcaggtcacaaaatttcgtagacatttagacacaggagaagtaggagtttatcttaaatcttcagaggtagggaagatggctaagtttcctttcagctacagcgacactatgagaaagttacccagaaataactgctctgaatgcttgctactgtggagatgacatgttttgggtgtggggatggtggttgaagagaagggagacattattattattattttataatgcaggccttaagtacctggcctgtccctatggggactgggtctctgtctcctctctgaattcatttttccctttctctgctatacagctccccgggactcccttctggccctgcagggtacaaggcctggccccatctcagggcctttatgttttgctgtgcccccttcacttggggtcctccctagacattcgtgatatggtttgaatctgtgtccccacccaaatctcatatttaattgtaatccccaatgttggaggtggggcctggtgggaggtgactggatcatgggggtggatccttcgtgaatggttgagcaccatccctttggtgctgttctcatgatagagttctcacgagatctggttgtttaaaagtgtgtggcatcccccctgcttcctttcctcctgctcccgccaccaaagacgtgcctatttctgcttcacattccgccatgattcaaagtttcctgtggctacctcagaagcagaagctgctatgcttcttgtacagcctgcagatgcataagccaattaaacctctttcctttataagttaccagtctctgccaggcatggtggctcacgcttgtaatcccagctctttgagaggctgaggcaggtggatcacctgaggtcaggagttcgagactagcctggccaacatggtgaaaccccgtctctactaaaaatagaaaaattagctgagcatggtggtgagtgcctgtaatcccagctacttgggaggctgaggcatgagaattccttgagcccgggaggcaggggttgaagtgagctgagactgtgccactgcactccagcctggatgacagagcaagactctgcctcaaaaaaacaaaacaaaacaaaacaaaaaaaaaaccttaaacaacatattgtgaacttttcttagagacactagcataatgaattcatgtactcatcaccaacttgaacaattatcaatattcagcctcttccatttataccccgcccatttgttttttaaaaaataaaaaaataacttttaaaaattaaaaaaataaaatcagaaggaaaaattaacataaaaaattcatcctacagatttcaaataggtacaactctaaaggcaaacctaattttcagaacaacgttaactgctgccatttggcgaatgtatttctgaatcaagaccttagcccattccagaagcccttctgaagtctgagctggcgttgcatatttatgggcaacgtaagtagaagatgttttatagagcagtggttctcacctggtgcaactgtgtctccgagggacttctgacaatttctggagctctttttgattgtcacaactgagggaagtgctactggcaactcatgagaaaggccgagaatgttgcttgacatcttacaatgtcaatggtttttatattttatagtgtcaacaggggcccaaggacaggcccccaccacaaacaaccctccagcctggcatccatcatgtcgcggttgagcaaatggccaatgaactaagctcgttctgaagtcactcaccccaaaggaaacagtgtccactcaccccagcatctgcagggcacagtccgggtggctcaatgcctcacacagcaccaccactgcatcagcatccaaggcaatccagtcgaggttcaggctcctcagtgttttgcaggcgatgagtgctgcggcgatgtcgtcgcagcaggcacgggtgatcggacacgtttgcagcctgcaaaagggaaacacaccagagaatccactctagctttgggtaggctggaaggcacgccattgttacttgctaattacacacctcccggcaggacgctctgctgtctagacccgggcttctcagccaggacgattgtgctcctgggggacgtatgtctagtgacctttatcccaactgaaggtgctgctggcaacttgaggatagtgtccaggggcgctgctaaagaccctatcatgcacaggatggcccccaaggcaaataactctccagtttcaaacagcaagagtaccaagactgagcaaaccctggggcagcattttacatatcagatcgtcccagagggacttgcttttaaacctgcctcccttccattctattgaccctccagcaattcctattcttgaaatagataaattttcctacgatggtgatcagtagatactcacccgagacactctaatttacagtgaggatgctgcaaagctgcacataactgtctgacaccagtgtctcctatttcattatgcccaagtttcagggtcttcagtttcccattgcaaataagaacagcagcaatgtccttacaggaatcggaagtaaggaaacagcccatcaacctggggaggtggaagacacacaaatacgtacacttatgaggtcaatcataacagcccaccttattttcatttattcatatgacgcaagaaatacccaagtaaatctgagatgatgaggagggtggggaggggaaggaggagagaagaatgagggaggagagaagagcagaggacgggagggtgggagaatgagggaggagggaagaaggggagaaagaggagggagaggagtgggaggggaagaagaggggaggaagaggagtgggaggggaaggagggggaggaggaggaggggggaggaggaggaggggggaggagatggaggaggggggaggagaagggggaggcggaaagggagggggaaggggaggaagagaggaggagggaagacaaagaaggtggaagcagcaatgacttcccagttcctccaccttccctactctgctccaacactttggggtccctgcacttcttctctcctgcctggctctcttttctctgtggcctctcctcattattctccctggttgaaatgctcctgccccaattatcagcatagctacctcctccccaccttcaaatccctgtgcaaatgtcacctttttggtgagccctcccctgactattttgtatatcatgtgtccaatccctctccaggccccaagctggtgattccttacagtacttattactccctaatacagatagacagaaaaatggtagatagaggacagaggataggggacagatgaatagttaatagatgataaatgacagatgacatatagatacatgatacacatagatgtgtggataggcacgtgtctacccacactcacacatatatatgtatgtgtctgatgtatgtacttgtgtgttggtggctctcaggcaggcaagatttttgcccaccagaggacactggtagtgtctggagacatttttggtctaccacgccaggagagaaagtgcccctggcaccttctctccctcctcccctcctcctcctctccctcctcccctctccctcttactcccctcctcctcctctcccctctccctccccacctctcccctctccctccccacctctcccctctccctccccctccccacctcttcccccctcctccccacctcttcccccctcctccccacctcttcccccctcctccccacctcttcccccctcctccccccttcccctcgtcccttacctctttcatcctctcttccgctcctgccccgacttccatcccctcttcccctctcctcccccatcctcccctctcctccctcgttcttctctgctcatctagtggctgagaaccagggaagctgctcaacaccctaggaagcatgggacagcagccccaacaacacagaatgaattgggctaaaatgcccccatgtcaatactgagaatctaggatgcagacacatccttgcagcctcacacatgcatgtgtgtgtatctgacactccatcagatggaagtccatgggaacagggatgttagaatgctctattgaccaacttatccacctagaagcatcttcagttcctagcagagggaatgaatgagtctcacgctctgactgtcatttatcaagagtgtatgacaagccaggcattgatcatagtccttcatgtgtgtgattccaactggccatctcgattctttaaggaggaggctctagctatcctctcattacctggggagaggtgagtcacctgcatgcattgatcatagtccttcatgtgtgtgattccaactggccatctcgattctttaaggaggctctagctatcctctcattacctggggagaggtgagtcacctgcacaagctcaggcagtcagggccactcgggactccatccaggcctttctagggctggagacccaactcctgagtcccctgctgtgtccttacaactccttcccactgaaggttcccagaaccaggtggggtaaatgtatagcctcatctggatttttttttttcagaagacaccattctcttcttgtctcagtctatttgggctggtataacaaaatgccatagactgaaacgggtcccttatagacaacagaaatgtatttctcacagttctggagccgggaagtccaagatcaagatgccaacaaattcagtgtctggcgagggccacgttctgctttggaagtggcattttctcacggcgtccacagatggtggaaggggcagaagagtctctggggcctcttttataggtgtgggagactccaccctcataacctcatcacctcccagaggatccacctcctagtaccatcagcctgggggtgaggacccaacatacgaattttgggaggacatatacattcagatgctagcatatccctttcctatgtctttcctagagccacagtatccaaaaaaagaaaccctgacattgaagcaaatcatggccggtcctaccacagctcccgtatgctgcagcctgggtgcttcagcgctgcacacagagatgccactccattatcttccagggcatttgagcccagatcgaggagggacagggacttactgcacaagaggacttcggaaatggagtcacaggagacagaggtgagacagcagtacatcaacctgcaaagaaacacaccgtctcccagcctgctgaacagcagtacatcattctgcagagaaacacaccatctcccagcccactgaagcttcctatggtaatattaccatattttctttgtcccaggcaaaacctttccagatgttccttgaactctgctgtcactcaagaaaataaggagctgggtgcggtgcctcacgcctgtcatcccagcactttgggaggctgaggcgggcggatcacctgagataaggagtttgagaccagcatgacccacatggtgaactcctgtctctactaaaaatacaaaattagccaggcatggtgacgcacacctgtaatcccagctactcgggaggctgaggcaggagaatcgcttgaacccaggaggcggaggttgctgtgagctgagatcgtgccactgcacttcagcctgggcaacaagagcgaaactccgtctcaaaaaaaagaaaaggggattaaaacttgtaacacctacagatgtacagaaagatgaatgtggaatacagtgtcccaacaaacaatctcagattccagttccaagtcacatcatcaccagctggaagacctagggcaaaagtcacccattctttgcaacagagtatacatatggcttaacggaatgtactggacgatatcccatgtagaataatttttgttttgttgtttaatacacatatttaaggttttgttaaaagaatagattttaagtgctctagtcacaaaaaaataaaatgcttcaatgatgtcagatgatgagtatgttagtttccttgacgacagtcaacattttactatggatatgtatgtcaaatactttttgttttaaaaattatttaatcacaatgtaccgtatacttcgctgagagttgattttaaatgttctcacatcctccaaaatgataactctgttaattagcttgattatagtaatcattttacagtgtatgcatatatcagaacatcacactgtatggcttaaatatatgcaatttttaaatttaaaaattttctttttttttttttttttttgagatggaatcttgctctgtctcccaggctggagtgcagtggcacaatctcggctcactgcaacctccacctcctgggttcaagggattctcctgcctcagcctcccgagtagctgggagtatgggcatgcgccaccacacccagctaatttttgtatttttagtacagatggagtttccccatgttggccaggctggtctcaaactcctgagctcaggtgatcctcccgcctcagcttctcaaagtgctgggattacaggcatgagccaccacgcccagccagctccattttactgatgagcaactgaggcgtgggaaaggaactcaggtctagctacggattccgcattctgctgcacccctcagtgagcaccgcgttgctttgataatgggtggatccaggtgcacgcttcagaaatctccgaacgtgcttcccgcagaccaacttacatcagcctctccagggcacagtgtgagtgcttcagggcttcacacagcaacgtcattccttcgtccctcaagggattttctaccaaggagaggtgtttcagcttgctgttgcaggccaggacggaggcgatgtcttcacaaacttcactggagatgtcacactttcccagtctacatgtgaaacacacaccatgagacggaccaaagctttcaatcgctcatgaaacattatccacagaccaaacgacacctctgattctagtcttgcacctgccgatccattatctacactacagactctttttcttttttttttttttttttgagaaggaatctcactctgttgcccaggcaggagtgcagtggtgcgatctcggctcaccgcaacctccacctcccgggttcaaatgattctcctgcctcagtctcccaagtagctgggattacaggcgcccgccatcacgcccagttcatttgtatttttagtagagatgggggtttcaccatgttggccaggctggtctcgaactcctgacctcaagagatctgcccacctcggcctcccaaagtgctgggattacatggatgagccaccgcgcccggccacattacaaacttttaagaagtgcaaacgtaatgacatgactccctcattaatcccgtaggtttgcactgaagttaggaaaaatgtcaaagcccacgcttctcaccacctggggtgatttgccctaatggagacatgtggaaatgtctgcatatattattggctgtcacgatggaggcagccaggaatgctgctcaacgtcctttagtgaacaggacagaccctgccacaaagaagtatccagaactcgataaatctgactctctgtcaatagcactacaagaaataggaaaacccaaactgtgttttttttcctactttcacacactcagcgcaacacgcttctgtggccggagacgggagggcagctcttttgcagccactaagtaggtgtcctaaaacttaacccaatcctgacacttcccagaggagctagacacagagttgatcgattatgcctgtgtgatgaaacctccataaaaatcctacaagaatgtggttcagagagcgtccaggttggcaaacacatccacacgccacgccccagctccacagggacagatgctcctgcactcgtgtggggaaaagaatgagagatcagattgttactgtgtctgtgtagaaaaggaagacataagaaactccactttgatctgtactaagaaaaactgttctgttttgagatgctgataatccataactttagcctcaaccctgtgctcacagaaacacgtggtttaatggatttagggctgtgcagcatgtgccttgttaaccatatgtttgcaggcagtatacttggtaaaagtcatggccatcctccagtctcgattaaccagggacacaatgcactgcggaaagccgcagggacctctgcccgagaaagcctgggtattgtccaaggtttcccccactgagacagcctgagatatggcctcatgggaaaggaaagactttaccatcccccaacccgacacccgtaaagggtctgtgctgaggaggaggagtgaaagagggaggcctctttgcagttgagataagaggaaggcttctgtctcctgctggtccctgggaatggaatgtctaggtgtaaagctgaccattcccattcattccattctgagataggagaaaattgccctgtggctggaggcgagatatgctggcagcaatactgctctgtgactctttgctacactgagatgtttggatgaagagaaacataaatctagcctacgtgcacatacgggcacagtacctttccttgaacttattcatgatacagattccttcgctcacatgtttctctgctgaccctctccccacctgttgcccagccacattcccctcgccaagatagtaaaaatagtgatcaataaatactgagggaactcagagaccagcgccagtgcgggtcctcgcacgttaagcgtctgtcccctgggcccactgttctttctctatactttgtctctgtgtcttgtttcttttctgagtctctcatctccacctgactagaaatacccacaggtgtggaggggctggcccccttcacactcaggacccttccagatctcatcctgtgtgtctatctggctgcacatctgtatttttcagatcatttattaaattgagagtcagatcccagctgcacatctgtatctttcagatcatttattaaattaggtgagagtcagatcccacacggtaggagctcagtcccacaagatcacccttgacttcagatgccagttgcaagcgctgggttgctctgcctgtgtttgaccaaccggctatacatgggggttcccctgaccccttccttgggttagactgatttgctagagtggatcacagacctcaggaaaacaattacatttcataaatgattgcttgagctcaggaggcagaggctgcagtgagctgagatcccacctc[134 bp omitted]cggcctcccagagtgctgggatgacaggtgtgatccgccatgcccggcccggcccctggccaccttcagatctgtcttctccatcccgctcaaagggcaatgcatatgcaagtgtttatgcatggattgtttgctctccattgtgataattttttaaaagctcctcagtcttttgactttttattaattattgcatgcctgtatctaattatcttctgtgccgcatagaaagctcctcattcttcaagcctctcgattgaaactatgatggggatctctcctgtcagaccaagaggaaatgggagagaagatgtagcagaagccatatttaaagatagagatcatggtaaaatgttctcagaagcctgtgcaaatgttcatccacaaatgcaggaagctcagtgaatttttaagcaggataaacacaaagaaataccaaaaccacacacaatgggggtgggaggggaaacttaaaattagccagagacaagacacattaagcacattgcctacaatgggacgaaatatactgatttatttagaaaaagcatggcagcctgaatgggatggaattacatctttaacatgtaaaagaacaaaagaaagaaaacagtgaaagaaaacctacaattctctgatgtgtgggggaaaaaaatctacaaaaataaaatcaaaacagatatttttggtctcaaatacaccgtggtcatctggtttataatgataactactgttgttcacttgagaaaaagtggtttttcaacagcattctgtgttcatatgtgaattttttttaaacctgactttatactacatagaaacacttactcaaagtaggtcatagccccacttgtgcatggtacaataagactttgagagaaaaatgcacaggaagttattcttatgactttgggcttggaaacaattattttcttttgagacgtggtctcaccctgtcactcaggttacagtgcagtgacgtgatgacagctcactgcagcaaccttggacctttgggctcaagagatcctcctgcatcagcctgatgagtaagccgtgactacaggcatccaccaccatacctagataatttttttgttttgtttttagagacgggagtctcactatgttgcccaggctggtctccaactcctggcctcaaacaatcctcctgcctcagcctcccaaactgctgggatcacaggcatgagccaccaagcctggcaatgattccctaaacacacacaaaaagcagctgaacacgaaaagacacattcagttttgataaagaatctctcttaattcaaagatgatattaagaatgtggaaaaccaaaccacatagaagatatttgcaatgcatgtatttgacctaggattcattccgcaatataagaaaaacacctgtcaatcaattagaaaaagacagcccaataaaacaatgggctacatcagcacatcaaacagacatatcacaacaggaagcccagaaagtcaaacaaatgaaaaggcgctcatattattagtcattagagaaatgcaaattaaaaccactcagatattatgcccgaagcagaatggatttgaaaagatcaacacccttaagtgttggggagaaaacgggacaagtggaacacattcatttcataggcaaataatctggtgaagcctctggttaaaagatactgattaagtctagtttcactggaagtttcataaaagcatatttttaaaaacagctttgtacatttcattagtaaagtttcctagttttaagaatgcactattgttatgtaagatgttacctttggtggaagttgggtggtgattggtatatgggacttctctgtactattattgtaatttcctgtgagtataataatctttcaataaaaagtaaacaacaatgacaaagtaaaatggctgatgtggagaaacaggtgtttgtcataagggtttccagatacacacgaattaaggtgtggtatccataaaaatgtttgtccagggccactgcacagtattagatgtttttttcctagtacaagagcccctgggttggatttaggcaaataccccattctgttttagccaagctgaccccctcccaccaccagaagagaagcatcactctaatctctcctagggcacttcacaggctagcactcagtagtccagtactagataatcctttgttgttggggagctgtcctgtacattactgggtatttagcagcatccttggtgatatggtttggctctgtgtccccacccaaatctcatcctgtagctcccataattcccatgtgttgtgggagggacccagtggaagataattaaatcacaggggcgggtctttcccaggctgttctcctgacagtgaatatgtttcacaaggtctgatggttttataaaggggagtttccctgcacaagctcttttctcttgtctgccgccatgtgagatgtgcctttcaccttccaccatgattgtgaggcctcccaagccacatcgaactgcaagtccaataaacctctttcttttgtaaattgcccagtgttgggtatgtctatcagcagtgtgaaaacggactgatacacttggtctctatccaccagatgccagcagcaccctccccactcaactgtgatcattgaaaatgtctctaaacattgacatccccaaagggacaaaattcccccattgagaactactgagctagagagaacctgactttgaagaccttccaccaccaataccacactgaagtaaatgaatagttagtttaccccaaaaggcaacattcccagctacattatgtctatcattgtagatatgttccccaatccttatgttaatgtataatagataaaaccctatgcaaataacataattatgaaatggagcaaaatactatagaattttgaaagttccccctgagaagagaaagttagagtagaagttaaaaaaaaagttgccatgatatggaaacagcttgaataaggaatgagatctacagcagttctataagctcaaacaacccttatgcatagaacctgcctctttctcctgatgggtctagacgcataaaattaaccaagtatagatgaatctgtcaattacatttttgacggttactgcaaagacaagacagtgaactgggagagagaagagcatattctcttagggggtttagtgggctgattttatttattgctgcctcaatgacttcctttgttctctttggaaagatggattggccagtgattattctactataaagatacatgcacatgtatgtttactgcggcactgttcacaatagcacagccttggaaccaacccaaacgcccatcaatgatagactggataaagaaaatatggtacatgtacaccatggaatactatgcagccataaaaaaggaagagttcatgttctttgcagggacatggatgaaaccggaaaccatcattctcagcaaagtaacacaagaagagaaaaccaaacactgcctgttctcactcataagtggagttgatcagtgagaacacatggacacagggaggggaacaacacacactggggcctgtcggtgggtggggagctgggggagggaaagcattaggagatatacctaatgtaaatgacgagttgatgggtacagcaaaccaacatggcacatgtatacctatgtaacaaatctgcacgttgtacacatgtactccagaacttaaagtataataataataataatagaaaaagaaagatagattggctctgcctggaaatcacccagttaggacaggggctgctctgacaatgttcaagaggaagaaattactttgggcaagtcattctccccctggctttaatgctgtcaactgccaaatcagacgatcacacttgtgatcattaacatgcttcagtttcaagtttctataaatatctttagggaaaaaaaaatgttgttcttgttttggcctggttgcctgagggcagaaccaggaagtatcaagggaggtgtccgtgagatgagcctggatgcagtggctcatgtgaagtactgtaatcccagtactttaggaggtcaaggcgggcagattggttgagaccacgagtgcaagatcagccggggcaatatggtgaaaccccatctctacaaaaaattacaaaaattagctgggtatggtggcgtgcacctgtaatcctagctacttgagaggctgaggtgggaggattgcttgaacccgggaagctgaggttgcagtgagtcaagattgcgtcattgcactccagcctgggcaacagagtgagaccctgtctcaaaaaaaaaaaaaaaaaaaaaagaagtaattaaagtgagtactagagatgggaaggcggaaacaaaccttctgagaggaggccttgcccggcagaatctaccttcaccttatgagagagacagattcaaaagatgaaaaacaagagagatgaaggctgatgcaatgaccctccaggaaggaaaacaagaaaatcaaactgcaaagcccaccttggaaagaaacagcactcggcatgaacagcccggacttacatcagctcttctatcttgcacattggatgtttcagcgtctcacacaggtgtctgatgtcagactgggagaggctagtgccgtacaggctcagaagtttcagatgagggttgtgaagaactgccttaaataattctgaatcatgtccaaagtacacagaagtaaatctgcaaaagattaaaaaaaaaatagcatcatgcaatgagatcccagcacaaagacagacacctcttgtacgattcttcctgccctgaatgctgggcctcaccacactgtttctggaattctggttactcctgccagtaaattatttctcgatggggtttttagacaccagacagcacagaggctcaagctgcttagaactttcctgtttcttcctagcccctccacttctacataactccaaacatagaaggagaacgagtcagccgaatcccatgttaaaccgagccccatggggacaggaacaaactatacttgtacctctttgtattctgagattaatgtgattaatgcctcacataaaatgacgcacacatatctgaattaatgctccaagcaaaactgtgttacccaaggaaataacccatttctgttttaaaattaagatttttttttttttaataaaagagacaatgttatgtagtgtcaaaaaactcaggctccagagttacaggaaactggatttcacattttgcttttctccttgttgcttttgcaagattgggcaaatgacctaatggctgtgtggcccagtctcttcatgaaagatatggtcatggtaattaagaaattaacatttaaggccaggcatggtgactcacacctgtaatttgggaggccaaggc[131 bp omitted]gaggtaggaaaatcacttgaacccaggaggcggaggctgcagtgagccgagatggtgccactgcactccagcctgggcaacaagagtgaaactgtgtctcaaaaaaaagaaatgagcatttattgtaatgcctggaacatggtcaattcatgctggcttttattttaatatctacatgtatatgccatatatgtgtatttataaaccaaatacgtaactacaaatatgtgtctataagccagatatgtacatatttaccagataaatacaaaaccagaatatgtacttaaaatccagacaaaatttatgtataaaccatatataatatgtatttattagcctgataaatgtgtatttacaaaccagacacacgtaagaataaatacatgacacacagaacttgctctatgtgactcctggcgttacagcagatgagcgcaccctgatttctctcctagtcaactttaagaaatgacagagaattttaaaagtaaatacttttaccatgttcaaaaactagaatggaaattttgagtaggccagaatcaaaacacagataagggcagatcacagaggggaacagcaggctggaggaactgtgcggactgcgggcggagtgatcccctaaatgtctgagtgacacccaggtaccacctgcccggagataaaggaagccaggagctggtgacagggcggtgaggtgtacagggatctgtgcggcgagggtgagcagagcctgacccactaacaggtggaagtgctaccacatgaaaacagggaacccaggccgggcgcggtggctcccgcctgtaatctcagcactttgggaggctgaggtgggtggattgcttgagctcaggagttcaagaccaccctgggcaacatgatgaaaccccatctctactaaaatacaaaaattagctgggcgtggtggcgggcacctgtagtcccagctactggggaggctgaggcaggagaattgcttgaacccaggaggtggaggttgcagtgagccgagattgcaccattgcactccagcctaggggacagagcgagactgtctcagaaaaaaaaaaagaaaaacagcaaacccccttgatttctggagacacctgtgagaataagcgggaggtggtggcaaaaaggacaggaatatccggcctccaagccaccacaccacattcatgaaagcaccgggattggttagctaggcagctgcagtgaatgccaaccgtcagccagcagcaaacaatcgagtcaacagacaatatggtgggaaaacagtcacaaagatgaacatgtaatcaggaatcatcgccatttcaggataatcaacctcatggaaaaggggcaaactaaaatagaagagttgattatgataccatttgttgactatttgccttgtcaactttttcctttttctacacataaaatgataaaaaatgcaattgctgagatgaataaagaagcagaagcctgggctcattccttcaactttgagtccaatgcctccccagcgttagggattaaggaccgctggaggtatgtgtgtttggaacatattgatccatctgttattagtctgccctacaacccaaggaatcaatctacttctctcagcctctactgatgccactctgtttccagaaactattatcactttttctcaagtataacttcttccttaactatgagggaaaaaaagttgataaatagaacaggatctgaactaaccattccatgtgagtgatggcagttgaatgatacctccaatgttccctaaaccctaaccttggggaggcattagaatcgatgttgaaggaatgagctctggcttctgattctccatcgtctcagcaattgcatttatcattcatatacacaacagaaaagagaaggaaaaacatttttcaatttcaaggcatgtggctagatacctttgaagagaaatgaccaaactgtctctatcatttctggacaacttaaaatgaatctaatgatgtttttactagacactgaactaaaggacttgtgtaaaatatcaatgagttgggaggtcaaggcaggtggatcacatgaggtcaggagtttgagaccagcccggccaacatagtgaaaccccatctctactaaaaatacaaaattagccaggtgtggtggggggcacctgtaatctcagctacttgggaggctgaggcaggagcattgcttgaacctgggaggcggaggttgcagtgagctgagattgtgccattgcactccagcctgggcggcagagactccatctcaaaaaaagtttttttaaataaaagatcaattatttattctgtcatcaacactgtgaagaagcactaatgtcctcattttgtaacctaaggttcctaggaaggacacgtgcatcttaattcacgccttcacccaggtttatccagattactgttctgcttcatgttaccattgacctcatgtgaaaatcaatgacttcttgtgctttgagactgaatttataaaacaaaaatcaatgacaaatgtcttcattgcaagaccactaaccacctcttccttgctagtatccctcacatatcccattgaaattcagatactgcttatgcgttataatcaagccagtcccctactttaacattttccagaaaaaaaacagttcagtgaggtccactttttactctccatgtgggatctttagaaattcttttgagtcagttccttcattattttcagcacacattcattctatggatgtttagtgagcccctacaaggctttgtatttttctagatgctgaggatgtgagggtaaacgcatccccatccatcatggaggtttagtcaacagagaaacactgtgctccccaagatcactcctagctttggtgacttgctaggagaccttgtacgacttgcaatacagtcttacaatggctatgatttatttcagcaaaagcacacaaaggaaaaaccaccaaggggaaaaggaacataggaaaaatccagagaaaaccagacagaagcttccaagagtcctctccccgtgggatcaccaggacacaataaattcctctagcaacaaaatgtgagaacacatgtgaagtgtcatctaccagggaagctcattaaggattcaatgtccgtggtttttactggggcttgtcatataggcaccctctgcctagcatgaaccaaaattcaaaactcactgaaggaaaccagacattcagtataaaccacagtgccggtagaatttacgaacagtgaaccattcttatcagtcaggttggtggaaactctcc[134 bp omitted]cccgtctctactaatacaaaaactagccaggcgtcgtggtgcatgcctgtaatcccagttactcgggagactgaggcaggagaatcgcttgaacccgggaggtggaggttgcggtgagccgagatcattccactgcactccagcctgggcaacaagagcgaaactccgtctcaaagcaacaacaacaacaaaacaaaaacaaacaaacaaaaaagacatcagccaaggaccaacttagcaaacaggcctttctcgagacagcagtcttaacgtctgctatgttaacttttttctgcacaaatatgtgggccaataattcaacgcaataactcttaccaaaaagatgtataaggtgctttgggagcatagcaagtcttccgtgatgacatgacttttcaagctgaaggaagacttaaatttaacctgaaagcagtaagtttgcttacaggggtgaagagaacagcatggcccaggcaaatcaagataagtaaaatatcagggaacaactgtgtttctatcctctcatacattatttgtataaaagtaataataaaaactttattaggattaaaagaaacggaagaaaatattgcacatcagcactctgttttatgaatgctaccattatgcttatcttatttttctttttctttttttttttttttttttttttacaaatttaaggctatttttctgtctgtcctcagcactcttcctttctcacctgagaaacatctattctccatccactcacatccaagcaaaggtcatccctaaccaggactgctcgctctctggccctccaactagatttcattttacatgtcactacatttttttttttttttattatactttaagttctagggtgcatgtgtacaacgtgcaggtttgttacttatgtatacatgtgccatgttggtgtgctgcacccattaactcgtcatttacattaggtatatctcctaatgctatcccttccctctccccccaccccacaacaggctgcggtatgtgatgttccccttcctgtgcccatgtgttctcattgttcaattcccacctatgagtgagaacatgcgttgtttggttttttgtccttgcgatagtttgctgagaatgatggtttccagcttcgtccatgttcctacaaaggacatgaactcatgcttttttatggctgcatagtattccatggtgtatatgtgccacattttctttatccagtctatcattgatggacatttgggttggttccaagtctttgctattgtgaatagtgccgcaataaacatacatgtacatgtcactacatttaacacactggattgccgctctgcatttatgcatgggtcttcttccaaaaaggccacagtagagagaaggaaactctgccatttgcttaaaggacaggttaacataaaacttacatgagttttcggagtttacaaacaggctgagccagcgctttgcaaagaatcgccagggagggatcatcgaggctggtattttccatgtctaaaatctggaagttcttgttggtaatgaacattgagcaaagctcccgccagtagacgagcttctcattgtaactatgagagaacaaagattgtgattctccagtggctaaactcaattcaagacattctcaaaacaggtcgaacaccatttccaaagcacctcaaagctgacagacacccaggcctgaacagggagaaggtcagccaggtaaacggagccaacatgacataatagttagaaagtaggccctggccaggtagagtggctcaagcctgtaattccagcactttgagaggccaaggcaagagaatcgcttgagcttaggagtttgaggacggcctgggcaacatagcaagactccatctctattaaaaatttaaaaaattagacagatgtggtggcatacacctgtagtcccagctatttgggagctgaggtgagagaatcacttgaacccaggagtacaagactaaagtgagctatgatcatgccactgcactaagctagggaaacagagctagaccctgcctcaagaaaaaaaaaaaaaggagcactatttacaatagcaaagacatggaatcaacctaaatgcccatcaatgatagactggataaagaaaatgtggtacatatacatcatggaatactatgcagccatgaaaaggaacaagataatgtcctttgcaaggacatggatggagcgggaggccattatccttagcaaacgaatgcagggacagaaaaccaaataccacatgttctcacttgtaagtaggagctgaatgatgagaacacatggacacagggaggggaaccacacacactggggcctgttggagtgtggggcttgggaggagggagagcatcaggaagaatagctagtggatatcgggcttgatacctgggtgatgggatgctctgcccagcaaatcaccatgacacacgcttacctatgtcacaaacctgcacatcctgcacatgtatccctgaacttaaaagttggaaataaaaaaaaagaaagtggatcctgagacaagagtagttgattggaatcaaactctggtgtaaacatttagtaactatgtgaccctggacaagctattcaaccttattctgcttcatttcctcctcgtttagatgtgaatactcgattgttctgtgaacaagggttatttggtgacccctcagtgaacagggaactgtatccaaaaatgttatcatgaacagcagcatgtatctgagagctaacgtatgagctggtaacctgaacccgatggaagaatacaaggcaaaatcagcagagggaaaaggcatatggaaaaaatgcagaggaaacaaggcacgaacttccaggagtcccctctcagtggggtcactgggggataccgcacaagctatggagggggaaaagaaaagcacagtctgacaacaataaaaatggtgaaaaaaaaaaagaagaaaaggaaagaaagagagaaaaaaagaggaaggaacggagggagggagggaggaagcaagcaaggccaggcgcggtggcttatgcttgtaatcctagcactttgggaggccgagatgggtggatcacctgagttcaggagttcaagaccagtctggctaacatggtgaaaccctgtctctaccaaaaatacaaaaattagccgggcgtggtggcgggcacctgtaatcccagctacctgggaagctgaggcaggagagtcgcttgaacctgggaggtggaggttgcagtaggccgagatcgcgccactgcactccagcctgggtgatagagcaagactccgtctcaaaaaaaaaaaaaaaaaagtcctgctagccgcctcttaatctcacacgagccctatgaagtagacaaaacttttatttctctttatacaatggaaaaagttcaagaagttgcagctcatgatcccacagcagtgccaaggctcgaaaggaaggctttctgactccgacctccatgcttttaagcacagtggcataaggcccatgaaatacccacaggccactagagcaaactccaagtgtagtgtgtgggacgggggattaatagacagactcactctgagatgcatcctgagtcatctggaaagatattctccacacacatgcgaagtgtcgttaaatgttgacaatgcttcaggcagaatgaagctattaccaaatgttctatgttaccaatataaatgaaaacttcttcaaagaaattcatcactttggttacaaattctttttcctgagtttcaaacaaaccaatgaatagttcctggaaagctatggcttccctatcagcttcacattgacttaaactttcaaggcattgggttatttcctgctttaggtcttttgacagtggaaaaccaaaggaggtctccagcatgctgacgatttcttctgttgaaattccaaacatgaatatccccacctgggtcaagagggtttgaggctgaaccacacttgctcttacaagctgggttatgcttccaatggccgggttaggatcgtctttgggtcgtttgagcaaataaaacatggcggcacaaaactcttggatacacagatgcatgaaggcaaaacagtcccctctcctttggaggagtctcatacccacccacatcacgccctcagactcagataacccattcctccggagatccccatgggaaaatacaaatgtatatgtccaaattccctctgcagccaaagcacacaggctttttagtcgggctctgttcaccttaggtggaaaactctgacttcctgctttgaatacagttgttaaaaaggatgcatataaataggtggtgttttgggagtttatttcaaggtcttctcccctctctagcctctgtttcacacaagtacagaccaaccagcacgtaaagggattatggcacaagataaacagcggcccattatctctcacaaaattgaagactttcagggctttgctcttctcaccaaagaagtaggagaaatacgacttcttttcagattcactgaatcctaagagctttatgagttttggatgccgcaacataaaatagtgtttttgcatagccagttttcctaatgcaataaggagagaggattctggaagcatctttttttgcaacaaactgctcaggataattggcattggctgccgctgcctccaatcatcgctcaagtcagccttaagttgtaagttaaacttcagttgctcaaagccatccatgatgaacagaattctctctggctgggaaaaaatgtcttcgatcttctctgaagactccggccagtccctagagaggagctccagtaagctggtctctgcgataccgttcatttcacagacattgaggaaaaacacaaatgtgaacctgtccttccataagtttccctctgcccagtccaacatcacttttcttaaaagggttgtttttccaattccatcaggaccttccaggaccacagtgtgtcgtctagccgcagcagtatatgcgtcattcaattctttatactcatttttcatggtttctttgtagaaatgctcagggacgtgaagacaggtttccttctcccatatgagttgaaatgtttccttcatatgctttctgtatgggtttagcttatctgtgttaatgagaacaggatataagataggtaaaaatgcactcattcttttatacttctgagaactgtaaaccaaaaataaaattctaatactcgccagccatctgaagccagggtgcttttaaaatttaacctgagagactggttcacgccatgatgggaagtgggggtcagacatacttccttgtacctctccattaacaggaacacaggcttgaagtctgataagaaacattttacaacctattctctctgaaggtctcctgtgcaaataaggatgtggatctccacaatcctttatcttaacccagacatttcctttattttgatcccaggtctttagata[138 bp omitted]gccgcagcctcccgagtagctggggctacaggcgcccgccact[187 bp omitted]gaggcacaagaattgcttgaacctaggaagcggagattgcaataagccaacattacaccactgcactcaagcctgggcaacagcctgacactctatctcaaaaaaaaaaaaaaaaaaaaaaaaaaaaaaattactatatcaattgtttctaaaattggtcttgtctatataataaccttcccctactttctgcattttctttaattaaactgatgatagcaggtcacctgtcagcaaagtacacatatatatacacacacacatatatatatatatatacatatatacgcacacacatatatacacacatatacatatatacacatatatacatacacatacacacacacacacacatatatatatatatatattttttttttttttgagatgaactctcgctcttgtcccccaggctggagtgagatggcgctatctcagctcactgcaacctccgcctcctgggttcaagcgattcttctgcctcagcctcccaagtagctgggattacaggcacctgccaccacgcccagctaatttttgtatttttcgtagatacagggtctca[134 bp omitted]atgagtgatgagaaatggggaagggagaagaattaaaatcctgttcataatctgagttttcaaatttcagaaaaattttgagtcttgggaagggactggacggaaggagattgcaaaggggccctacagtcgctcacaggaaggcagggacggttccaccgatggtctgtgctctccttgcacactcgtctgtggacatcacaggagggaacagcatccactttattctccgctatatccctttaacaccgtcgcacaggagttattcaagtctctgagcagtgactgactttgtataaaattaatattgtaaaactgtcttgaatttaaaacatacatgctaggcacggtggctcacgccggtaatcccagcgctttgggagtgctgaggcaggaggagcacttgaggccaggagttcaagacgagcttggccaacatagtgagactccatctctattaaaaaattaaattaaaaaatatgcagataaagagaaaggaaataaggccattccaaaatgtcatcaatgtatgtaatcatggctcatagcttgatctgtgtctgtattactctacatttttcttctgcccgatttttctctctacagtagaattatactgtatatactattttcaaacatggtttttgactgaacaatatattatggacatctttctaaattcatgcacatttttcatcacaaaacactatgctatttattaaaaaatttttttttttagacagagtctcatcactctgtggcccaggctaaagtgcagtggtgtgattgtggctcactgcaacttccacctcccgggttctagtgattctcgtgcctcagcctcccgagtagctgggattacaggcgtgcaccaccacgcctgggtaatttttgtatttttagtagatagagtgtctcaccatgttggccaggctggtctcgaactcctgaccttaggtgatccgcccacctcagcctcccaaagtgctgggattacgggtgtgagccaccacgcctggcaaaaccctatgctatttaattgaatggatttatcattatattattcactttctatatttgcccatagtaaacatttgctgacctccaag[179 bp omitted]gtggcaggcgcctgtagtcccagctacctgggaggc[144 bp omitted]tttaggacctcagtgtcccaagtgagaaactctcagttcagacactgactcggtcattttttcatctgccaacatagaacattaatcagcagaaaagtcaaagacacgaaccacacagataaagaaaactggcacacacctgtaatcacagcactttgggaagcccaggcaggaggatcatctgaggtcaggagtttgagaccagcctgaccaacatggtgataccccgtctctactaaaaatacaaaaattagctgggcgtggtggtgcatgcctgtaatcccagctactcgggaagctgaggaaggagaatcgcttgaacctgggaggcagaagttgcagtgaaccgagatcatgtcactgccctccaacctgggcaacagagcaagactccgtctcaaaaaaataaaacaaaaacaaaaaaaaaaacaaaaaactaacacagcaagcaactccaaaccaaataaaataccctcaagcatgtggggatacgaaataaggtctcaaattagaattaccaacacaaagaagaaacatgaacaaaacagaagtaaacgtaacagaagttgatggaactcaaaagtaaagggagaagataacaatcatcagaaacaaatgctaattactagatacctaatagggaatatatttagtttttcctaagtatcccccgagaggagggtgtagaccccatcaatgagtccagcagaactggttcggagtcagatctgtcacttttggaaaagtcatgtaacacatgggaacactgttttgtccagttttctcacttgtaaacctttcctgggttgtgataagaatgaaaagacattatgcagaaagaatgcttccaggacgtgaggacaacctggctgtgatgtctgtcaccccattggtcgccccagggctaattcggctgatgtggccagctgggtgggtgtccacttcctccctcactgctccatatgcgtccgtcctgaaagtctcccctgggtcaaagacgatgacaacctttgcccatagaggaaggtccttccatcgcgggcagaagagaagctgtgctcccctactagaacctccaaacaagctcgcaagaatgcttcctgtagtacccgggacatacgctgtctgattgtcttaagattctacctactccttggtacatgtctggtcaaaaaggacaggcagttaggcatggtggctcactcctgtaatcacagcactttgggatgcctaggcaggtggatcacttgagcctgggagttcaagaccagcctgagcaacatggcaagaccctttctctaaaaaaaaaaaaaaaaaaaaaaaaaagataggcaactaccatactagaattccatctcagtagacctggcaatgcagacactaactggccactcatctcctataacaacgactccacttggggtggaaaaatgggaagacactccataggtgaacagttggtatcaggacgccatctgtccccagttcatcgctggcccacatatgaacagccctggcctgcaactcttcctaccttcaactctcaccttgacccacacacattctcatctgatggagggggtggccactcatttaacaatgctatcaccttgttcccaggcttcccccatgggtcctcgccccatcatccagcacttacttctcatctcttcctgagcctttgtccagagatctttcctattgatctgtagaaacaggttcagtgttacctcccatgcctgctttcctgggtaatgtttgtccagcagctttgctacatcttctttggaggccttcttcagctcagcccaggggattggcttgagttcaaatttctccaaaggttgtttgaggagctccttaaatttccaaaactcttcctttctgagctccttcagataccacaacaagccaaaatccgaaaaaaaagattctgccatatcgccccaggattgtgaactgaggtgtctccagagggaaaagaaagatcctcaaaaataaagaataaatgatacctggagaagaatgacatgattacagagttaagcttcagcagctgaaagcagctcaaaattattgatatcatcatgcgtagcttgcaccaaacatcatctagggaagaagcttcatctttttccaaacaaatgcatgtgaatggtagagttgactgccacttatgtgtcttgtttttgtctgacataaatgatgcttccaggaacaagtgtttttgtgtagtttggtgtatataagcacacatttctctagatttataaattataggtcaaacagcaaacacaggtcaccatgtttgctacataacactcaacggttttcccttgtgtatataattactgacattcctaccagcattctatgagtttgtttgctctgtagaccttcccatccttagtatagtctaatccaattttgataatgaaaaaatgaacggatattaaaattacagatgatcacattcaggaagatgaaaataaaggaagagga[202 bp omitted]accaca[172 bp omitted]gaaaaagttagatttactataggttagcatctgcagacaactcagacagaaacagagcagtgaacgttcccagtattataaacccttcagataatcattgcaattcaacaaaagacaggaaatgaagtagaaatatatggtagacaaaataagacaggtggcaaaaataataccaaatatatatagatatgtattttgagatagagtttcactcttgttgcccagactagaatgcaatggtatgacctcagctcactgcaacctctgcctcccaggttcaaatgattctcctgcctcgtcctcccaagtagctgggattacaggcacctgccaccatgcccggctaattttttttttttgtatttttagtagagatggggtttcaccatgttggccaggctggtctcgaactcctgacctcaggtgatccacctgcctcagcctcccaaagtgctgggattataggcttgagccactgcgcccagcctaaatataatcttaacacatatgaatgaaataaaattgctcactaatatatagactcacattggataaatacaaatcctgctatatgctgtttataagagaatcctagaaaatacacagagaagtaaaacagaagaagaaaaagcctggcaaattcttacccaaaaaagtattaatagtataaaatatcagcattgaaaaacactcaagctagaaagcactaaatggactaagaatttttgaacaccaagattcagttccccaagatctagaactcatgagcatatgtgcacctgggaataccactttacacataaggagatgatgacaaacgcaatatcattgtatctgagctaatatacctttcagataattacaaaccattagcaaaggttacataccatctatggtcacatgcaaaagaataaacttggacccttaataccataaacaaaaattaatgcaaaatggattgaagaagatctaaatggaaggcccaaagtataaaactcctaggagaaaatgtagggcagaagcttccagacacagatttggtctggattatttcttgaatatgacatgacacagacaaaagaaaaaaatagacaaactggactttataaaaattttaaaattttgtgcatcaaaagacagtatcagccaggtgcggtggttcatgcctgtaatcccagcactttgggaggccgcagcaggtggatcacttgaggccaggagtttgagacccatggcccacatggtgaaaccctgtccctactaaaaatacaaaaattagccaggcgtggtggcagacacctgtaatcccagctgctcgggaggcggaggctgcagcaagctgagatcacaccgctacactccagcctgggtgacagagcgagactctgtctcaaaaacaaagacgatatcaaaagagtaaaaagtcaaccaacagaatgggagaaaatatttgcaaagcatgtatctcacagggattaaaatccagattacagggaatgcctaaaactcaataacaaaacaatcttataacaatgagaaaaggactagaatagacatttctccaaagatatacaaatggtccatagccaataagcacataaaaagaggctcaacgtcactaaccattagggaaatacagatcacaactacaatgagataatccttcacatccactaagatggtaactacaaaaaaaaaaaaattcaaaacaagtgttgatgagaaggtagagaaactggaacccttgtatcctagtgacgtataaatgttaaatggttcagccactgtggaaaactgtatcatatttcctgaaaaaataagaacagaattactgtaggatccagcaaccccaaagaattgaaagcagactctctcagagttatccggacactcatgttaataggagcatcagtgacccaagtgttcatcaacagatgaatggaaaagtgaaatgcagtctataaatacagtattatacagccttaaaaaggaaggatgctgggcccggtggctcctgcctgtaaccccagcactttgggaggctg[137 bp omitted]gctgaggcaggagaatcgcttgaac[142 bp omitted]tgtccccaggctggagtgcagtggtgcgatctcggctcactgcaagctccgcctcccgggttcacaccattcttctgcctcagcctccggagtagctgggactacaggcgccggccac[184 bp omitted]ccttgaggacattatgccaagtgatagaaaccagtcacaaaatgacaaatactgttccattaaacgtatatgaggtacttaaagtggtcagaatcatagagacaaagtagaatgatggttgccgaggctgaagaagaaaatggagagctattgtttaatgaggacagtttcagttttacaagataaacagttatggagatggatgtgacgatgcttgtacaacattataagtgtatttagtaccactgaattatacacttaaaatggttaagacggtaagttttgtattatgtgtattttaccacaataaatttcttgagacaaggtcttgctctgtgcccaggctgagtgcagtggctcaatcacagctccctgcagcctcgaccggccccccacccacacccaccggggctcaaggacctcctcagcctccccacctccgcctcccaagtagctggggctagaggcacacaccaccaggcccagctaatttttttagatttttgtagacatgatgtctcactatgttgcccaggctggtctcaaactcctggtctcaagtaatcctcccacctcggccttccaaagtgctgagattataggcaagagccaccacacccagcaaaaaaaaaaaaaaaaaaaaattagtaatatgctattgaggtaatgcacaagtttgtgacatatgtatgtgaaatatatgtatacattttttaaagggaaagtggtttgattccaaatcaaatatgtacatttcattcaaacgcatatgggacatttactaaacatgaccttatcttgggcataaagaaaaactaaaagagaaacaggtattctaaatcagagatcactggtctcattcaacaatcacaataaaattagaaaataaaggc[149 bp omitted]gcctcagcctcctgagtagctgggattacaggcacctgccaccacgcctggctaattttttttatttttagtagagacggggtttcaccatcttggccaggatggtctggaactcctgaccttgtgatctacccgccttggcctcccaaagtgctgtgattataggcatgagccacggcgcccggcctccatagttaaattttaagtgtacattttaatgtaacaggcaagtaagaagctaatttaacttactgagaaaggaacagacaaacttcatgaaataaacttcaatggctgttaaaaataggaaaaattttctagaagctcattttccatccagatttgaaatatataggccgggtatggtggctcatgcctgtaatcccagcactttgggaggctgaggtgggtggatcacctgaggtcgggagttcaagaccagcctgcccaatatggtgaaactctaactctactaaaaatacaaaaaattagccgggcatggtggcgcatgcctgtaatcccagctactcgggaggctgaagcaggagaatcgcttgaacccaggaggtggaggttgcagtgagccgagatcacaccattgcactccagcctgagcgacaagagcaaaactcagtttcaaaaaataaataaataatatacataattttcatcataatatatggggaaatggatgttaaacaatggtggaatacaaatgcatgtaattttggaggaaaatgtggcaacctctattaaaatggaaaatgaagattttcttcaaccccacgattttactctctggttatccattccaaagtagcatttgcaaatgtgcctagagttttgtgtgcacaaatggtcgctgcagggttttaaataattgttgaaagcaaaaacctaaatattcataaataagaaaacagttaaataatggtatactattatagtacaattggaccattgtatggagtcagacggagactagaggggctggagaagatacggggagtggtttgatggacattgcatagagtttcagtttggtatgaacaggttctagggatggtggtgatgaccgcacagcaatgtgaatgcacttaatgccactgaattgtactcttaaaagtagttaagatggtaaattttatgtatatttcaccaaaagtttaaaacaaacaaacaaacaaaaaaacaaaccccacatcccctcaatctcttctccgaacattcctttctcctccctgctctaggggacacccccctctacagatactgagtctcccgcggctctctcatgccgacggtttcatcagccccattcttcatgctgtggagtccagataaggtatagataccctcgctggtgctccctaacacctcacagactttcggccaacactaggctccaccacccattaccattttgtgttgttgccatccaaggtctctggcacaatctcctcattcctcccagattctaccccctggctcacccctactctcaagctattcttgtgggcatgcaaagcaaccattactgacaacgtgatgaatatgtcatttagcataaggttaggacattttagaactggctgataaaagattacttcaaaaccaaccagccaagtcaccagatcaacaggtctcaaacttccttctctccacttcactctttctcactgccagagatttggtgttttattatttgtctccccaggttacatgaatcccccaatcagaaccaacagaccaagtctggaaaatggaccttcagttttcgatattttcatcatttctcctcagctctccaagacctccaattttctgtatctctaattcaatttcagaaaaaaaaaaataaggagacaatgccttctggaagagtccctttctctcacccaatttagagtccggaaacacaaaagttaacaagtgaaagtgccgggtacacaatctctctgcaaatttatctggttttcattacaggccgggagcagtggctctcacctgtaatctcagcacactgggaggtcgaggcgggcggatcacttgaggtcaggactttgagaccagcctggccaacatggcgaaaccgcatctctactagaagtacaaaaattagccgggagtggtggcgtgcgcctggagtcccggccactcgggaggctgaggcaggagaatcgcttgaacccaggaggcagaggttgtggtgagccgaggtcgcgccattgcactccagcctgggtgacaatgcaaaactccatcttaaaacaacaaataaataaataaataaatggttttcactacaatgcatccttgccaaaacaaaaggtcaagacttgatcatttctggtgccctcttacctgttccttatgcactccagaccttcaggaagcactgagactttagggaaatgaagaagaaagaaaggtcagggggaagacttacccaacccagcccctggtcctcctggctggaactcaacaaagaacagcggtggaaacttagaataaaaggccctggctgctctgtgactggccacagaatctctccttttcattggctgtcatggatattgatgactagacccagacggcaattgtttaggttcttttttaactcctcaggtgtgaatgcttttcccccagctggatagtccgtgctgctgttaatatcatctccctacgtaatataatatgatcacagggcttctgcgaactatcttctcccgaccaatgagagctggtttggagactagtaatgggaaccactgttctcataatctgagtatctgactcctcctatgaacttcctaaggaaatctattttgtgcatgtctcaacttccgctttaaaagttgagcacttaaaaaggagcatttgcatgtaaggaaatcaatgaatatgctcgagtaactggctttggatgtaaagggcagaagtcagaatctgcagttgtctcccaaacaccctgttaccctcatcattgactcctgtgcgaatgctgccccctcttcacgctcatccccattatccctcccgcagctgccattcttgtccccaccctctttaacattaattgaatgctaatggtgtaaaagccctacagctgagtgcatttcatgcaagatccttctcttcacagtcctcggaagtagatagcattattattcccattgtcaaagatacttgaggccatcagggtggaggctagagttgagaacattcctacttggtcagcccaaattttaaccgctgcattgtcctgcctcccagccatcattgatcccagtgaggcttaggaatgtctgtgttggatctgtggggagatgtggctcagttctgcctaatgagactgagctaagagactcaaagaatctttcctctccaggatcttggcctttctttaaccagctactcaccatcaaaattctgacctgacctctttaccctgactgcttaaaccatccttagctgggccggggtgcatccattagagggctgtgtcttgatctccctttcttcagtttttctgatagccaccacaggatctggcatagaaggttagaagtggttaagcacttgagctggaacagcaacctctattctagactgttggtgtggctatgggcaagtatttattaacttcacttgtttttcctcttctgtgaaatgaagaggatgatgatcgtgatgatattgatgatgatggtgatgatggtgatgatgatgatgacggtgatggtgaagatgaagattattatggtggtgatgatggtgatggtgaagatgaagatgatggtgatgatgatgacggtgatggtgaagatgaagattgtgatgatggtggtgatgatgatagtgatggtgatgatgatgatggtgatggtgaagatgatgatgatggtgatggtgaagatgaagataatgatgatggtgatgatggtgatgatggtgatgatggtgatgatggggggcggaaagggtggctgggctgtcacttggtttctcttttgtgaattgcctgttcttttccttaaagatttacctgactttatgtatttttttgtgtatatttatgcaaaatacaatttgctggttaatatagaatcataaatctttctaaaatttgggattttctatttattgtctatggtattttaggggtagagttgttttaaaatgtattaatgtctatttttattaatcttatcatttgtgggtgatataaatacttcctgtcctgaaagtcaactatttccctatattttctttcacacattaatatctctttttacattttcaattcacttatacataataaatcttcataatgtgatgtagtggttcagttttatctattgataccaattacttcaacacatatattgcatagcctatcttcccataccaattttctggcgccatccacttgttgtgaaacacccacctgttgccttgatctctttctgtaacttttgttgtactatatttgtctattttctgttactgctacaatatcataccactttacagatattgagtattggccgggcacagtagctcatgcctgtaatcccagcactttgggaggctgaggcgggcagatcacctgaggtcaggagttcgagatgagcctggccaacatggagataccccgtctctactaaaaatacaaaaattagccaggtgtggtggcacatgcctgtaatcccagctactcaggaggctgaggtggaagaatctcttgaaccccagaggtggaggttgcagtgagctgagatcgcgctattgcactccagcctgggcaacaagagcgaaactctgtctcaaaaaaaaaaattgaatatttctgtattacgtgggtttatagtaatgtatttccatatgcatttttatagttttatcctgcatactattttaataatattaaagttattgcacagtgccttttagagtgttgagtatcgggacacacattctcacgttgtgtcactgattcttgctcatgggaaattgtttccaagtgtgtcttgtagttattttgaagcaatgaataaggaatattttcactttggtgtgaccatatggcttcacttgcaaaaggtaaccaaaagtgttcaattctgcttctggtaggttcatccaagtaggccttgtctctcataagtgtgagggttagtgtgttggtttcgtattttttctttcactatccttccatgaaatttctgggactgcctttggctttcaattcctaatattttaaaattgccgagaaacaattgtcctttgggggaagtaattggcttactttctctcctggcatagaggtaaggattctgttgctgaatcgctagagtttcagcacttcaagaatctcctgtgagtgaagagttcagtttctgcatctcacttcgccagtgtcaacgcttacacccgtccctgcctgagtgttgagtctctgggcctcaaaggaatccaactcatttctaactctgaccctccaaccatgcccaaagctcgtagtagcatggacttgagagggaacactcggaattccatttcactttcgtttacacgtcctggaggtttctttagttttgttgaaagttcacctttcattattatattgatgaaattagagttaattgtgttagacataattatgccaattataatgatggtgaaatttttcttttaatttcaggaaattctgcaggcagttatctctttctcttttggatatatattagttctttaatgaattgcactatgccttatttcgttctggctgaaactgaatttcccatcctggctgaatattatattagttagaccatgcctattaagaagtccattggtgtccgggcaccgtggctcacacttgtaatcccagcagtttgagaggccgaggtgggtgaatcacctgagatcaggagttggagaccatcctggccagcatggtgaaaccccatctctactaaaaatacaaaaattagctgggcgtgttggtgggtgcccgtaatcccagctgaggcacgagaattgcttgaacccagaaggcagaggtgccagtgagccgagattgtgccactgcactccagcctgggtgacagagtgagactctgtcttaaaaaaaaaaaaaagtctgttggcaaaatgttagaagttgcatcttatccacatgtaacaaatatgtagttagagacccttttgataaagcctattcacaagtattccctaaaagctcactcagaagataaaattgtttcttcagatatatttttctaattgcaggaatttattttcagaaggctttttttttttttagacggagtttcgctctgtcgcccaggctggagcgcagtggcgcgatctcggctcactgcaagctccgcctcccgggttcacaccattctcctgcctcagcctcccaagtagctgggactacaggcgcccgccaccacgcctggctaattttttgtatttttagtagagatggggtttcaccgtgtcggccaggatggtcttgatctcctgacctcgtgatccacccgtcttggcctcccaaagtgctgggattacaggcatgagtcgccacccccggcctattttcacaagttttttaaacaaactggaaattctcttgaaatgacttggaaactaaacaagaacctttttgaacattttatttgccaaaaagtagtaaccaaaataaatgatattttaatttcttttttattaaaagattttccgctagctttattaaaatataattgacgggtaaaaattgtacatattcaatgtgtttgaaacgataattcgattatacataggcattgtgaaaagattaccacaaccacattaacacgtcatcacaattacttaactttttgtgcttgcgtgggataagaacacttaaaatctactttcttcacaaattgtaagtaaactgtacagtattattaaatatggtcatctccttgtacatcagggcttcagaatttattcatcttattattgagagtttgtacccattgaccagcatcttttcatttcctcttctcccagcccgccacctctgtactctctgcttctatgagtttagctttttaaaaaaatattccatatacaagtgagatcacacaatatttgcctttttgtatgtggcttatttcactgagcaccacgtcctccagactcatccatgttgtcacaaatagcagaattttcttgtttcttatggttgagtaatattcaaatgacagttttataacttcatcatttcttctacatttattagctgacgttttaatagagggatgaattttactcacttgttcgtttatttttttctgtctgatttttaaaaattttcctttaagttattggggtacacaggtgatattaggtcacatgagtaagttctttggtggtgattggtgagattttggtgcacccatcactcgagcagtatacacggcaccgtatttgttgtattttgtccctcgcccccctccctctcttccccccaagtccccaaagtccattttatcattcttatgcctttgcatcctcatagcttagctcccacatatcagtgagaacatacgatgtttggttttccattcctgagttacttcacttagaataataatctcgaatctcatccaggttgctgcaaatgctgttaattcattcctttttgtggctgagtagtattccaccatataaataaaagtagaactaccatttgatcccgcaaccccactcctaggtatctacccagaggaaaagaagtcattatatgaaaaagacacttgtacacacctgtttatagctgcaccattcgcccctgcaaaattgtggaaccaacccagatgcccagcaatcacggaatggatgaagaaactgtggtatatttcacttgttcatttcaccagtattgattcattgattctcatttcattctcaaggttatgttattgtaaatatttagtttggtattcaaattggtccacattcggcaagtgggacccacttcaatttcattttcatttcaagatc[167 bp omitted]gcctcccgagtagctgggactacaggcgcccgccaaca[174 bp omitted]caggttcctctagtatttcccttgccccagccctgatttagctatttcttcaaggggtcttgatttctcttagtgtagaataatatttaaaattcaagatctaggtaccagttcactgacttttgataaaaatatatgcccacatactaccaacccagtcaagatatgagatgtgtccacattcctagaaagtgcgcattcttcaacagtcaatgtccctttctaatatatgaaaacatgtttggtgccaaagcttaaaactaatagtccataaaactgtgattcatcagtttattttaaaagctatttctactgcaggttaataagaaatacattacagaaatgcattgttgcttatgatcctaacactgtacgtgccattttgttctatttttaactttaactttacaaaattctgaaatctacatactgtgtttgttaaggactggaacgatagacataaaattcaaatgtgactgtggatgaatggataaagaaaatgtggcacatatacacaatgaaatactattcagcctttaaaaagaaggaaatcctgttatttgtaagaacacggatgaacctggagggtattctgggttttttcattagtctttccatttttttttgtttttgtgggtacagagtaggggtatatatttatggggtacatgagatattttggttcaggcttgccatgtgtaataatcacatcaaaatgtatagagtatccatcacctcaaggatttatcccttgtgttacaaacaatccaattatactcatttagtttatttttatttgtattttaagactgtctcactctgttgcccaggctggagtgcagtggcaccatctcagctcaccgcaacctctgcctcctgaattcaagcgactctcctgcctcagcctcctgagtagctgggattacaggtgcacaccacggtgcctggctaatttttgtatttttagtagaggcggggtttcaccatgttggccaggctggtcttgaagtcctgacctcaggtgattctcctgcctcagccttccaaaatgctgggattacaggtgtgagccaccgcgcccggcctcttttagttattttttaaatgtacattaagttattttttactatagtcaacaggttgtgctagccaatcctaagtcctattctttctattttttaataccaattaaccatccccacttccccgccaagtcccctctgctacgattcccagcctctggtaatcacccttctactctgtctccataagttcaattgctttaatttttagctcccacagataagtgggaagtttgtctttctgtgtctggcttatttcacttaacgactggaggacattatgttagatggaataagtcaggcacaaaaagacaaatatcccatggtctcacttatacgtgaaatctaaaagaaatttgatctcagaactagagagtagagtagtggttattagaggctgaggaaggtaggagaaagtaaggaaataagaagaggtgagttaatcaattgaggtcaagagttcgagaccatcctggccaacatggcgaaaccccttctctactaaaaatacaaaaattagccagacgtggtggtgggcgcctgtaatcccagctactcgggaggctgaggcaggagaatcacttaaacctgggaggtggaggttgtagtgagccgagatagcaccactgcactccagcctgggcaacagagtgagaccctatctaaaaaaaaaaaaaaattgacagaaggaaggaattcataataaatgtgggtttccacgttaagcaaaaacatttgtggtaacctctctatataccattagtaaaactcttatttctgcctaaattaaaatatgattggattaagaaggtgtggcctgatgtgattaaggtgggaagaggtaccctcttcaataaaagcctcttgcccatggatgtcactccaaaaccaaattatttcagaaggttcgaagccaaaaaaaaaaaaaaagccaaaaaaaaaaaaagccacaatggaagaaaggtaaatccaattttatataatttacatttctacaaagggcagagagagcaaagtccagggaactgggtaatttattaattcagcaagtgttgtgtgaagccgtgaagccaactccatgccaggtacagtgtgtgcactgagccctctgccctggcaggtattggcaggacttcaatttcaaaacccaggctggtgtactgacaagggccttcattttctttaatcaaatcatagcttcaaagactctgcaggacgctggtgagttgagtctcagccattaacttactcaatttctcaggtcccgttagtttttcccacagtcatattagacctgctgggggggagtcggagggtctttcagtctagaccagagctgttcataagaaatatactgtgacccatatatgtaatgataaattttctagatacactaaagaaaatggaaggcaacatgttgaattaattttaacatccgaaagatttgtcattttaaaatgtaaccaatattaaacagctatgaatgacgacctttttcatccaacatcatcacgatctagtgtgtgttttacactcacagtatgtctccattcagataaactccatctcagcgggttgctagccacatgctgttggtggccaccatattggacagcccgggtctagaccctttttaccacttcaactctatgtcgaataatgaacgatattcttcattccagctagcatgtgaaattcagaagtcagcagccatgactcttcacgtctgtacccgtattgcctggtacaagggatatcacatagtaggtacacaatccctaaagtgaaagaaccccagttcattcgtctcgtggaatctccacgaagaggcacattttccccccaggcagcagccacggctgaacattcgtgagaagcaagatgtcttaactgtctggcctgtctcgagaaacttgtattcttgagatgtagatccatcagctgcatcaattcactgaagaggaagccccaaagtggagggtgtatggtgccctttctgtaccgtggtcactcagaagaatgagatcaagatcaactgtcaaccggggaagccagcttccgagatcaaagaactagagccacacctgagatctgttctacagctgaaccaaggatgctgaagttccaaggtaaagtatctgccccacctagaccctccccacaaagggcctagggaaaaacaactgggcaaaagcctcttcacctaatattagaaggattctggctcctaacattgtatgcacctttgagcatcagtggttcttgcctctgagtatagaaccacctggagatttttaaggaaatggaatattcagctcatgccctagccctgtgctgtccaacagggtagggactagtggctctggaccacgagaaacgcagctggtacctagtggaaaggatgctattctgtacatatcgggttcaatgaaatatattactgaagttaatctcaccaggtcttttttatgtttttgaatgcagctactagtacatttacgagacatgcgggtcatgttatatttcttcaggcagcactggcctacaacttgaatatttgttaaattgtctgaggatcttattaaaatgtgcattctggtactacacctctgggatctcctgagactcaggatttctgacaagagcccagaaatttctgacaagagcagctgatgctgctggttcctgaaccatatgttgttttgggtttttttttccctcctttactaagttcttttttttcttttccttccaacttgtattttaggttcatgggggtacatgtgcagctttgtgacatgataaactgcatgcctcaggggtttggtgtacagacagtttcatcacccaggtaatgagcacagtacgtgagagggagttttttgattctcgccctcctcccaccctctaccctcgagttgcccccagtgtctttgttcccttctttatgtccatgtgacctcaatgcttagctctcacttctaagcgagaacacgtgatatttgctttcctgttcccgtgttatttcacttaggacagtggcctccacctggatccatgttactggagaagacatgatttcattctttgactgtgtagtattgcatggtgtatatgggccacattttctttatccagtccaccactcctggccatctaggttgattccatgtctttcctagcgtggatggtgttgtgacaaacatgtacgtgcatgtgtctttataatagaaaaataacaataatcaaaatttatacattacattggtacagattgtttgattctaattagatttttttttcaagttggagtctcactcactctgtcgtccaggctggagttcagcggcacaatctcggctcacagcaacctctgcttcctggattcacgtgattctcctgcatcagcctcccaagtagctggaattacaggtgtgtgccaccatgccgggctaatttttgaacgtttagtagagacgaggtttctccatgttggcgaggttggtgccgaactcctgacctcaagtgattcacccgcctcgtctccccaaaatgctgggatcacaggcaagacccgccgtgcctagccttgaattagattttaataacatttgtaaaaacaaaaagaattgaaaaacttctgccgaacctctgtagtgagttttcacttcagttattttactttatgcccctcaatttctaattagttcatttttaaaatttctatttggttattgatattttctattttgtgaggtgttactcttctaatttacttcagttctttgcctgttgtttcctttagttcttttggtcctccttcgacaagtaatttagtctgcagagaggaagcccaaggtcttgagcacatttatttcatcttgtgacttgtagacattcggttctctttgtgtgcctcatatattttttgttgaaaattggaagttttctgtggcagacgcagatcagattctcaaagttcacaggtttttttttttgttttgttatacttgcgggctgtagttttctgtttttgttttgttttgtttggacttaatgaaactattttgcaaaaattctgttttttctcctctgtgttctcagctcatcctgactgacacttctcctcacagaacttggtaaccagacgacccacatgagtgcttccttatatcctgggcaaaacacagaacctaaggaatcttgaagaaaaaaattcagagccacggttgagcaataacatgccctgcctggttctgagccacctcatccatgccccggctggactgacagtggggccacgtgctgggcagtggctcagggtgggaccacaatgtcctggttcacctcaaatccgtttgccgtaccaacactgacaatgagagaaaggaagacagtttcctttggaaactgagccaagccctgggttgtcagaaactctgagcttctcttcattgttaaagaagaaaatgtggcacatctacaccatggaatactatgcagccataaaaaaggatgacttcatgccctttgtaggcacatggatgaagctggaaacaatgattctcagcaaactatcagaagattggaaaaccaaacaccacatgttctcactcataagtgggagatgaacaatgagaacacatgggcacagggagaggaacatcacatactgggacctgtcggggggcggggggttaggggagggataacattagggagaaatatctaatgcaggtgacgggttgacgggtgcagcaagcccacatggcacatctatacctatgtaccaaacctgcacgttctgcacatgtaccccagaacttaaagtataattaaaaaaaaaaagaaaagtttgcttgtacagtgaacagggcctggggatcggaagccaccgaagccaaccatttacgtcagcttctgtgacacgcctgcagggacggggcatggagaatacagacctcgctgactgggatgttgaaggacaggtttttattcaaacacagaagacccctaaagtactgaactgtacatgagagtgggcaaggaaactttaccactgtctgaatagaagccagcggagctgctttctgtgaaaagatgcaattggaaaagatgtggaaagtatctaacacccaaaccaaccccaccagtgtgccagcaatcctaagacgctattctctaattctgaacggaagaactcctctcccaagacatgagcatgaatgcaattccaggctgtaagatattttgggagactattagagaggcaaatcaacccactgggcttggtgctttccacaactgaggccacctggtattcccaaagagaacagaaatttcgttcaagctttacgggaagcagataaaaattaaaagatgtgagggatcagtgctccaggaacatgggcccataaaattacaagctggagaataactgctcccagaaatgtgagtatattttaaaaggatttatatgagaaaataaagcaattagaattatgcaagaagagataagcattttctccctgcatgcatatgtgtagatacggtatgtgtgtatacatggacatacatgtggcagattatattataggtcccaatcaatgaagaaatgcaatgtgcaaggatttcatctaatatatgcaccacaacgtagagatttgtgtttctccatttgccttcatgagacaaaaggaattgagaactgccttggctttgaataggaaagaagagaatctagcaatcactagagaatgattactgtggagatgattaaattaaagactattaatttaatcacattaatgtaatcaaatcctttcccacctgacctccagtctcccacttttacattcttatccatgaactctgatcacctataatatatttaatacatgaggaacccgtttttgaacatttttaaagaggaaatgaatctcattttacttatgttgtgatgtaagggaaatagattgtaacagtaacgtttaactttcattttagatgctgcaactacaaagaaaaacggactttcactggctgactgattgtctggaaaccgttttgggatttctttcctaagcttcttaattagaatctttacattatagagaaaatgattttgagagttgagtgtggtctgtggagtgtcctattagtaacgacttctgagtaggtttaagtcacctcttttattgaaatgtgaaaaggtgtgacatttataatagaaaactctttgaaagtcgcaccgttcattttagaggaattttaaatgtcaccccaaattttacgattttaattaattttaattaatttccaaattttaaccaataggcataatattcaagatcttatctaaaaattattacatggcaatattttgtccttgttaattaaaaaataacactgaaaacacagtcgtcttcctttaaggtaaaaacctgtccaatagtaacaatctcaatgatggcagaatgaaatcagaatctgattggattaaaaaggagggaaagggtgtggctaaggtgggtggagacaccctctggtataaaagcccctggcaggcagctctcactccagatctgagctgtccgcagaagcagctggaggccaggggagaaactccagaaggagaggtgagttcaatcttatggaattcatttttacaaaaggcgtatgagagtctaggggaatgcaataatgtcttgattccacaagtgttgtctgaggccaaggccatgacagacacactgtatttctggaggataaggggacctcttccctggtaacagttaggtaagtcttagattttcaataccaaggcgagagacttgacaatctccatttgcttgaatttcgtgagaatttggtagactttctgaaatgatggacagaggttcggtggctgcgttactcaacgtcaggttttcctatgggtttggtattgttttcctattctccccttcccacaacccctggcaaccatcattcttctcttattttctgattttttttttgttcagttttttgttccttttaattcagaaagagaaagggaaggaaatgaaaagcaaagtttgtttacattactattgcggaaaagatctggccagatgctgggacccacctcttccaggatggggattcattatttctttaattgttttgagacagggtctcgctctgtctgccaggctggagtgcagtggctattttctgattctatgagatcagtcaactcagattccacataactgagatcatacagtgtttacttccctcagcctcacttatttcacttcccatcatgccctcggccttcatccacattggtgcaatgccagaattgccttcttttttatggtagaataatccaatgtatataccaccatttcctcatccatgtttctctcatagactctggggttgtttccatggctcttgtgaataacgctgcagagaacctaagagtgcagatgtctctttgacatgctgacttctttctttcacgtagaaacacggaagtagggttgctggaacacaggcagttctatccttcatgttttcagaaacctccctactattttctgtagtggttgtaccattttctttcccaccaaccgtgcacaagggttcccctttctccacatccttaccaacacttgtcttttgtctttttgatcatagccatcctagcagagaggggttaatatctcatcgcggttttgttgctggagggctcaggaggctctctggatgccagagagaccccagtcccagccagtttccaggttctggatgctgtcgggagaacgaattcagggatgagccagaatgaagtgaaaggcaagaagtttttattccagagcaaaagcacactgttaggagagaagtgtgggcgtgattctgaaagctggtggctttcgatggccttcggggtttctatttttgtcagtccttctaattaggaggtgaactaatcattaggttttctaggaaaaagcagagattttttagaattggtgaggtacccatttttgtactacatatgggcatgctggggtcagccgtgacactgcagaatgtgtgatttagtgtgataatgaccacggtcattactgtggcaatgctttgaaacagcttaactccctccggttttttatcacctcatgagcccaggttcctccttgtccttgtaattttaatgacaagtggctaattttaacagccactgttttggtcctatgtgaaaatgtcactggatacgttctcgattctcttgtgaccacacagtattcctgcctcagtttaaattgcatttctctgatggtgagtgaggttgagcttgttcctcagtacttgctggtcgttggtgtgtgcttttcagagaaatatctattcaggattctgcccattggaatttggattattttggcttttttttctttttgctacagccttgaaaatattccttatatattttggatattaatccattgtcatatatatggctgcttgtttgtttttcattagttctggtttttcctttttttttttttttccgctatgcagaagattcagttttacctggtacgacttatttgtattttgtgtcttgtccttttgttgcactatcagggttttcaccacatgcagtttgcacagttggggaagtagaaggtcttcaaatggactccagcactgtccaatagaaacataagataacccatatatgtaatggtaaattcagtttctggtagtcacataaaatagaacaaaacaagcctaatgaattttaactcaaaatataatatcgtttaacatgtgagcaactttaaacgttctcaagcagatagtttacgttctcttttccccattatgtcttcaaaaataagagcgtatttggctcacagcacatctccattcagatacaccccatttcaggtctcaatagccatttgtcactggtggctaccatatgaaacagttcaggtgtagactcctttactatttcaactcaaagtctttcggtgaatcatgccctttattccaatgagtattacagatattagaagttcagggcctcgagtcattgacatttgtattcatgttgtgtcttcgtcactagcagtagtgattttaagtgtcgtgctatgatagctccatgcatgtaaagataaaagccccaaacactatcagctgttcattcagctcgtggaaattctaattctgtgttcattttttttctatagacatttgccatggctgagcacttcaaacagatcattagatgtcctgtctgtctaaaagatcttgaagaagccgtgcaactgaaatgtggatatgcctgctgcctccagtgcctcaattcactccagaaggagcccgatggggaaggtttactgtgccgtttctgctctgtggtctctcagaaggatgacatcaagcccaagtacaagctgagggcgctggtttccatcatcaaggaactagagcccaagctgaaatctgttctaacaatgaacccaaggatgaggaagtttcaaggtaaggaatctataggacctgccacaacccataaaaggcactgggaaaatgtctttcaaacatttcttcattaaacataggcattagcaggatatctagcatctaaaacttccatgcttcacaaacaacagcagttctcacctttgcgtagagattttcatggaatctgtgcaagtttgtagaatactttggagagcaagctcctgtcttctttcttgtatcatatgtgctaaatggaaagctaattttcatcaaattatccactaacttatttcgaaaggcatttctaatatgaataaggtggacttgttacaatgatcatattcatgcaacctatagatacaatttaacctcatcaggtggccaaacaagtttccccaggaaattttgatttgggaaagaaagtagaataaaagtaaaagtgaataatgtgtttaagtgtttgcagtcaaagggcagagggagtctgtagtgtgtgtctttgctgaactcctggttcttctttgcacagtggatatgacgttcgatgtggacacagccaacaactatctcatcatttctgaagacctgaggagtttccgaagtggggatttgagccagaataggaaggagcaagctgagaggttcgacactgccctgtgcgtcctgggcacccctcgcttcacttccggccgccattactgggaggtggacgtgggcaccagccaagtgtgggatgtgggcgtgtgcaaggaatctgtgaaccgacaggggaagattgtgctttcttcagaacacggcttcttgactgtgggttgcagagaaggaaaggtctttgctgccagcactgtgcctatgactcctctctgggtgagtccccagttgcacagagtggggattttcctggatgtaggtatgaggtccattgccttttacaatgttagtgatgggtgccatatctacacattcatcgagattcctgtttgcgagccctggcgtccattttttgctcataaacgtggaagtcaagatgatcagagcatcctgagtatctgttctgtgatcaatccatccgctgccagtgccccagtttcttctgagggaaagtaaataaacatttgaacataatcatctttaggaagtttcagtgctcccatagccatagctaagaacttttccgctagatacacataggtacaaagggacagaagggaaagagccatcactctgtaaaccatgaacagaaagcaattatattaatgaggggaaaattacattgtacttaaagtttgtcatgttgttttctttggggcttatgtttatatttctgttcaataaatattttgaaaattcagattcatttgccaatcttttctattttctgcaagattagtttactatgtgttatggaagttatgaacgaaataataatttgaatgtgacccaacacagtaactgaatttcaaatgataaggacctatgaatacggcaaaattatatatgttcatgtattcagtttaacccaataactgaacactgacattcatttcaagtgcacactgagtgtttgccacgaatatgtgtggtcttagagagaactcgttagctttaaaattgaaatacaatacaccctctcctatgacggcaacagagtcaaattggaaatcaataacaggaagaaatccataaattctccacatatatgcaaattaaataaccacttctaaataaaatgatcaaatatgaaattacaatggaaattacagctatcctgagttgaatgaaaagcacacatttacaaaatttctagatgcggttgaagctcagtgagaaactcataataggaagaaaatatcgtaatcaatcaccttaatttctacttgaacttacttcactaagagcaattcaattgtcagcattttgatcaaaaccatctgacaagtatctgggaagttccagacattctcacatcttcctgtcttcttctgagccctgcaaacggttgcaacctctgcccgttacccagttccaaagtcgcttccacattttcaggtaccatagtagcagtgcctcactcctggtaccaatattctgtaacagttcattctcacactgctctaaagaactaccggagactgggtaatttatgaagaaaagaggtttcattaatttatagttctgcaggtcgcacggggaacatcactgggtggcctcgggaaatttaacaatcatggaggaaggcagaggggaagcgagtggctttttcacatagtgacaggaaagagagaaagaggaaagtgccatccactttgaaatcatcagatcttgtgagaactcactcacggtcatgggaatagcgtggaggaaatccgtccccgtgatccaatcatctcccacctggtccctcccccaacactgaggatgacaattcaacatgagatttggctggggacacagagccaaaccgtatcacttgatatgatcccacagaatactattcattttcattcagtcttttatttcttaacaaatggtggtaaagtatatataattgaccatcttaaccatttttaagtgtaaaattcaatggtatttatgatgtccatattattttgccaccatcactgccattcatctccagaaatcttttcatcttccaaaattgaaactgtatagccatcctagccctcttttaaattcatctatttgttgtctcgcctgagtgccttatgtattctggatgttaaccccttatcggatgtatggtttgcaaatatcttctcccactgtgtagattgtctcttcaccttattgtttcctttgttgtgcagcagcttttacatgtgatgcgatcccacttgtctctgtttgtttttgttgcctgtgatttaggtggttatatcaaaaaacaagtttgcccagacaaatttcttagatctttccccctgtgttttgatctgataggtttaccatttcaggtctttcatttaactcttttctccgttttgagttgattcatgcatgcagtttgatgtaaagatacaattgccttcttctatatgtggatgagttcttcgagcacaatttattgaaggggctgtactttccccatttcgtattgtggatcctttgtcaaaaatcaatttgccacatgtgcgcgggtttatatgggaggtttcattcctgtttcattggtagaaacggctgtttttattctagtagcatgtcgttttgattatactagttttataatatattttgaaatcaagtagtgtgatgtctacagctgtgagatttttctgcatatgattgttttagctatttggggtcttttgtggcttcacccaaattttaggacttttttctctttttctgtgaaaaatgagaattgtgattgggattgcattgaatgtgcggatccttttgagtgtatagacattttaacaatattaattctaatccgtgaacatgagatatccttttatttgtgtttttgtcaattttgttcattgctattttatactttttattgtacaggtctttctccttctttactgaatttactcttgggtttgattttcttattgttattttaattggaattattattatgatatttggagagagagtctctctctgttttcctggctggagtgcagtgcaacgatctcagctcactgcagactcctgcctcaggcccccaagtagctgagattacaggtagcagtcaccatgcccagctgatttttgtctctttggtagagatagagtttcaccattttggccaggctggtctcgaattcctgaccacaagtgatctgcccactttggcctcccaatatgctgggattacaggtgtgagccaccatacctggcccggaattattttttattttcttttttagatggtttatttacaattcataaaaatgctaagaatttttgtttgttgattttgtgtcttgcaccttcactgaattcatttatcagtcctaacagaatttgttggagtttttagggttttctctatataagatggtgtcatcggcagtgacaatttcacttgccttgaattagattttaataacatttataaaaacaaaaaaggtggaaaaacttctgtcgaatctctgtagtgagttttcatttcagttattttcctttatgcccctcaatttctaattagttcatttttaaaatttctatttggttattgatattttctattttgtgaggtgttactcttctaatttacttcagttctttgtctgttgtttcctttagttcttttggtcctccttcgacaagtaatttagtctgtagagaggaagcccaaggtcttgagcacatttatttcatcttgtgacttgtagacattcggttctctttgtgtgcctcatttattttgttgtaaattggaagtgttctgtggcagatgcagatcagattctcaaagttcacaggttttttattgttatacttgtgggctgtggttttctgtttttgttttgttttgtttggacttaatgaaagtattttgcaagagttccgttttttctcctctgtggtctcaggtcatcctgactgacacttctcctcacagaacttggtgactagacgacccacgtgagtgcttccttatatcctggacaaaacacagaacctaaggaatcatgaagaaaaaaattcagagccacggttgggcaataacatgacctgcctggttctgagccacctcatccatgtcccggctggactgacggtggggccacgtgctgggcagtggctcagggtgagaccacaatgtccgggttcacctcaaatccgtttgccgtaccaacactgacaatgagagaaaggatgacagtttcctttggaaactgagccaagccctgggttgtgagaaactctgagcttctcttcattgttaaagaagaaaatgtggcacatctacaccatggaatactatgcagccataaaaaaggatgactttatgttttctgcagggacgtggatgaagctggaaaccatgattctcagcaaactatcacaagattggaaaaccaaacacggcatgttctcactcataagtaggagctgaacaatgagaacacatgggcacagggagaggaacatcacacactgggacctgtcggggggcggggggttaggggagggatagcattagggagaaatatctaatgcaggtgatgggttgatgggtgcagcaagcccacatggcacatctatacctatgtaccaaacctgcacgttctgcacatgtaccccagaacttaaagtataattaaaaaaaaagaaaaagaaaagtctgcttgtacagtgaacagggcctggggatcggaagccaccgaagccaaccatttacgtctgcttctgtgacacacctgcagggacggggcatggagaatacagccctcgctgactgggatgttgaaggacaggtttattcaaacacagaaaaccctcaaagtactgaactgtacatgagagcgggcaaggaaactttaccactgtctgaatagaagccagcggagctgctttctgtgaaaagatgcaattggaaaagatgtggaaagtatctaacagccaaaccaaccccaccagtgtgccagcaatcctaagacgctattctctaattctaaacggaagaactcctctcccaagacatgagcatgaatgcaattccaggctgtaagatattttgggagaatattagagaggcaaatcaacccactgggctcggtgctttccacaactgaggccacctggtattcccaaagagaacataaattttgttcaagctttacggaaagcagataaaaattaaaagatgtgagggatcagtgctccaggaacatgggcccataaaattacaagctggagaataactgctcccagaaatgtgagtatattttaaaaggatttatatgagaaaataaagcaattagaattatgcaagaagagataagcattttctccctgcatgcatatgtgtagatacggtatgtgtgtatacatggacatacatgtggcagattatattataggtcccaatcaatgaagaaatgcagtgtgcaaggatttcatctaatatatgcaccacaacgtagagatttgtgtttctccatttgccttcatgagacaaaaggaattgagaactgccttggctttgaataggaaagaagagaatctagcaatcgctagagaatgattactgtggagatgattaaattaaagactattaatttaatcacattaatgtaatcaaatcctttcccacctgacctccagtctcccacttttacattcttatccatgaactctgatcacctataatatatttaatacatgaggaacccgtttttgaacatttttaaagaggaaatgaatctcattttacttatgttgtgatgtaagggaaatagattgtaacagtaacttttaactttcattttagatgctgcaactaaaaagaaaaacggactttcactggctgactgattgtctggaaaccgttttgggatttctttcctaagcttcttaattagaatctttacattatagagaaaatgattttgagagttgagtgtggtctgtggagtgtcctattagtaacgacttctgagtaggtttaactcacctcttttattgaaatgtgaaaaggtgtgacatttataatagaaaactctttgaaagtcgcaccgttcattttagaggaattttaaatgtcaccccaaattttacgattttaattaattttaattaatttccaaattttaaccaataggcataatattcaagatcttatctaaaaattattacatggcaatattttgtccttgttaattaaaaaataacactgaaaacacagtcgtcttcctttacggtaaaaacctgtccaatagtaacaatctcaatgatggcagaatgaaatcagaatctgattagattaaaaaggagggaaagggtgtggctaaggtgggtggagagaccctctcgtataaaagcccatggcaggcagctctcactccagatctgagctgtccgcagaagcagctggaggccaggggagaaactccagaaggagaggtgagttcaatcttatggaattcatttttacaaaaggcgtatgagaatctaggggaatgcaataatgtcttgattccacaagtgttgtctgaggccaactccatgacagacacactgtatttctggaggatattgggacctctgccctggtaacggttaggcaactcttagattttcaataccaaggcaagagacttgacaatctccatttgcttgaatttcatcagaatttggtagactttctgaaatgatggacagaggttcggtggctgcgttactcaacgtcaggttttcctatgggtttggtattgttttcctattctccccttcccacaacccctggcaaccatcattcttctcttattttctgattttttttttgttcagttttttgttccttttaattcagaaggagaaagggaaggaaatgaaaagcaacgtttgtttaaattactattgtggaaaagatctggccagatgctgggacccacctcttccaggatggggattcattatttctttaattgttttgagacagggtctcgctctgtctgccaggctggagtgcagtggctattttctgattctatgagatcagtcaactcagattccacataactgagatcatacagtgtttacttccctcagcctcacttatttcacttcccatcatgccctcggccttcatccacattggtgcaatgccagaattgccttcttttttatggtagaataatccaatgtatatatcaccatttcctcatctatttttctctcacagacgctggggttgtttccatggctgttgtgaataatgctgcagagaacctaagagtgcagatatctctttgatatgctgacctctttctttcacatagaaacacagaagtagggttgctggaacacaggcagttctattcttcatgttttcagaaacctccctactattttctgtagtggttgtaccaattttctttcccaccaaccgtgcacaagggttcccctttctccacatccttaccaacacttatcttttgtctttttgatcatagccatcctagcagagagggggtaatatctcatcgcggttttattgctggagggctcaggaggctctctggatgccagagagaacccagtcccagccagtttccaggttctggatgctgtcgggagaacgaattcagggatgagccagaatgaagtgaaaggcaagaagtttctattccagagcaaaagcacactgttaggagagaagtgtgggcgtgattctgaaagctggtggcgttcaaaggagtttggggtttctatttttgtcagtccttctaattaggaggtgaactaatcattaggttttgtaggaaaaaagcagagattttttagaattggtgaggtacccatttttgtactacatatgggcatgctggggtcagccgtgacactgcagagtgtgtgatttagtgtggtaatgaccacggtcattactgtggcaatgctttgaaacagcttaactccctccggttttttagcacctcatgagcccaggttcctccttgtccttgtaattttaatgacaagtggctaattttaaaagccactgttttggtctcatgtgaaattgtcactggatacgttctcgattctcttgcgaccacacagtattcctgcctcagtttaaattgcatttctcagatggtgagtgaggttgagcttgttcctcagtacttgctggtcgttggtgtgtgcttttcagagaaatgtctattcaggattctgcccattggaatttggattattttggcttttttttctttttgctacggccttgaaaatattccttatatattttggatattaatccattgtcatatatatggctgcttgtttggtttcttttagttctgttttttgtttttttttttttttttttccgctatgcagaagattcagttttacctggtacgacttatttgtattttgtgtcttgtccttttggtgtgctatcagggttttcaccacatgcagtttgcacagttggggaagtagaaggtcttcaaatggactccagcactgtccaatagaatcttaagataacccatatatgtaattgtaaattcattttctggtagtcacataaaatagaacaaaacaagcctaatgaattttaactcagaatataatcatttaagatgtgagcaacttgaaaccttctcaagcagatagtttacattctcttttccccattacgtcttcacaaagaggagtgtatttggctcacagcacatctccattcagatacgccccatttcaggtctcaatagccatttgtcactggtggctaccatatgaaacagcccaggtgtagactcctttactatttcaactcaaagtctttcggtgaatcatgccctttattccaatgagtattacagatattagaagttcagggcctcgagtcattgacatttgtattcatgttgtgtcttcatcactagcagtagtgatttaaagtatggtgccatgatagctccatgcatgtaaagataaaagccccaaacactatcagctgttcattcagctcgtggaaattctaattccgtgttcatttttttttctacagacatttgccatggctgagcacttcaaacagatcattagatgtcctgtctgtctaaaagatcttgaagaagccgtgcaactgaaatgtggatatgcctgctgcctccagtgcctcaattcactccagaaggagcccgatggggaaggtttactgtgccgtttctgctctgtggtctctcagaaggatgacatcaagcccaagtacaagctgagggcgctggtttccatcatcaaggaactagagcccaagctgaaatctgttctaacaatgaacccaaggatgaggaagtttcaaggtaaggaatctataggacctgccacaacccataaaaggcactgggaaaacgactttcaaacatttcttcattaaacataggcattagcaggatatctagcatctaaaacttccatgcttcacaaacaacagcagttctcacctttgcgtagagattttcatggaatctgtgcaagtttgtagaatactttggagagcaagctactgtcttctttcatgtatcatatgtgctaaatggaaaactaattttcatcaaattatccactaacttatttcgaaaggcatttctaatatgaataaggtggacttgttacaatgatcatattcatgcaacctatagatacaatttaacctcatcaggtggccaaacaagtttccccaggaaattttgatttgggaaagaaagtagaataaaagtaaaagtgaataatgtgtttaagtgtttgcagtcaaagggcagagggagtctgtagtgtgtgtctttgctgaactcctggttcttctttgcacagtggatatgaccttcgatgtggacacagccaacaactatctcatcatttctgaagacctgaggagtttccgaagtggggatttgagccagaataggaaggagcaagctgagaggttcgacactgccctgtgcgtcctgggcacccctcgcttcacttccggccgccattactgggaggtggacgtgggcaccagccaagtgtgggatgtgggcgtgtgcaaggaatctgtcaaccgacaggggaagattgagctttcttcagaacacggcttcttgactgtgggttgcagagaaggaaaggtctttgctgccagcactgtgcctatgactcctctctgggtgagtccccagttgcacagagtggggattttcctggatgtaggtatgaggtccattgccttttacaatgttagtgatgggtgccatatcaacacattcatcgagattcctgtttgcgagccctggcgtccattttttgctcataaacgtggaagtcaagatgatcagagcatcctgagtatctgttctgtgatcaatccatccactgccagtgccccagtttcttctgagggaaagtaaataaacatttgaacataatcatctttaggaagtttcagtgcccccatagccatagctaagaacttttccgctagatacacataggtacaaagggacagaagggaaagagccatcactctgtaaaccatgaacagaaagcaattatattaatgaggggaaaattacattgtacttaaagtttgtcatgttgttttctttggggcttatgtttatatttctgttcaataaatattttgaaaattcagattcatttgccaatcttttctatttgctgcaagattagtgtactgtgtgttatggaagttatgaacgaaataataatttgaatgtgacccaacacagtaactgaatttcaaatgataaggacctatgaatacggcaaaattatatatgttcatgtattcagtttaacccaataactgaacactgacattcatttcaagtgcacactgagtgtttgccacgaatatgtgtggtcttagagagaactcgttagctttaaaattgaaatacaatacaccctctcctatgacggcaacagagtcaaattggaaatcaataacaggaagaaatccataaattctccacatatatgcaaattaaataaccacttctaaataaaatgatcaaatatgaaattacaatggaaattacagctatcctgagttgaatgaaaagcacacatttacaaaatttctagatgcggttgaagctcagtgagaaactcataataggaagaaaatatcgtaatcaatcaccttaatttctacttgaacttacttcactaagagcaattcaattgtcagcattttgatcaaaaccatctgacaagtatctgggaagttgcagacattctcacatcttcctgtcttcttctgagccctgcaaacggttgcaacctctgcccgttacccagttccaaagtcgcttccacattttcaggtaccatagtagcagtgcctcactcctggtaccaatattctgtaacagttcattctcacactgctctaaagaactaccggagactgggtaatttatgaagaaaagaggtttcattaatttatagttctgcaggtcgcacggggaacatcactgggtggcctcgggaaatttaacaatcatggaggaaggcagaggggaagcgagtggctttttcacatagtgacaggaaagagagaaagaggaaagtgccatacactttgaaatcatcagatctttgagaactcactcacggtcatgggaatagcgcggaggaaatccgtccccgtgatccaatcatctcccacctggtccctcccccaacactgaggatgacaattcaacatgaggtttggctggggacacagagccaaaccgtatcacttgatatgatcccacagaatactattcattttcattcagtcttttatttcttaacaaatggtggtaaagtatatataattgaccatcttaaccatttttaagtgtaaaattcaatggtatttatgatgtccatattattttgccaccatcactgccattcatctccagaaatcttttcatcttccaaaattgaaactatatacccatcctagcccactttttaattcacctatttgttgtcttgcctgagtgccttatgtattctggatattaaccccttatcggatgtatggtttgcaaatatcttctcccactgtgtagattgtctcttcaacttattgtttcctttgttgtgcagcagcttttacatgtgatgcgatcccacttgtctatgtttgcttttgttgcctgtgatttaggtggttatatcaaaaaacaagtttgcccagacaaatttcttagatctttccccctgtgttttgatctgatagttttaccatttcaggtctttcatttacaatcaccattttaattccactctctaattttatgacttcagtgtttttaggttcctagtaagttaggtcattcggtatttatcgctttctatatgacttattccacttagcaaaatgccctcaagtttcatccatttttttatggtgtacgatatttcattgtatatatagcacaatttcttgatctattcttctgccaacattatcgagtaaaagggattcgctgtccaatactctaggagtgaataggatgacatggggatgtttgagaaaaggaaagcattgcattgaaatgaaaaccctagggagacaggagtccagctctaatctgtcgtctcatactggcttcatgtcagcatttattagaaaaggttcagagggcctggcatggtgtctcatgcctaaaatcccagcaatttgggaggcagatgcaggtggatcacttgagctcaggagtaggagaccagcctgggcaacgcagtgagacccccccctctccaaaaccacaaaaatgagctgcacatggtggtgcaggcctgtagttccagctactcggggaggctgaggcaggaggatcatctgagcccgggagtttcaggctgcagtgagccgagatcgaaccactgcactccagcctgggtgattaaaaaaggttcaggggatggattctgagatcagtaagtaattgatggaaggaaaagggaggtctggaaagtccatgggcatgggcagttatcttttcgtgctttcttgtgggtcgactgtggaaattcaaagggtgttaatgtacaacatgcagtggaaattcgggctgtgacttcagcaagcttgttctgcacagactccagctggccacattggctctagccaatttcagccagttcttttgtttcctgaacagagggagtttcagtgtttcagcaaagttgtttcttttctttgttttctttttctttttttggggggagacagggtcttgctgctgcctgggctggatgcagtggtgcgatcttggctcactgcagcctctatctcctgggctcacgtgatcctcccgtatcagcctcccgagtagctgggaccacaggtatgggccaccacacccggctaatttttaaaattatttgtagacacgggtctcacgatgttgcgctggctggtctcgaactcctgggcccaaacgatcctcctttctcagcctcagaaagtgctggaatttacaagtgtgagccaccgcgaccagccaagttttttcccttcttacctgccatgctgtacactcaaaaatttgttagttactggtttaactcttttatttttatttatttattgttttagacgaagtctcgctctgtcaccaggctggggtgcagtggcatgatctcgcctttgcccatttcataatcagaatgttagttttaggggttttttttttctattgcgttatgagttctttatatattttggatattaacctaatatcagatatataatttgcaaacatttttttccattctgtaggctttcttttcatcgtctcccttgtttccttcactatgcagaacattttttgtttgacatagtccaacttatttatttttgttttttgtgtaatataatgctgtaagtttcatgccacatccaggtggaacaaatactatgccacgggagtttttgagaaaagaaaagctttatgttaattcaactcccagggagacaggagtccagctctaatctgtcgtctcatactggcttcaaatcaccatttattagaaaaggttcagaggacctggcatggtggcacctgcctgaaatcccagcactttgggcggctgaggcaggtggatcatttgaggtcagtagtaggagatcagcctgggcaacatagtgagacctcatctctccaaaacacaaaaattggccaggcttattgtggaggttgagggtctccagtgctgtccaatataaacataatgtgatcaacatatgtaagataaatttattgtctaatagccacataaatcaagcaaaatgaaataagcctaagtaagtttaacaaaatataagcatttcacatgtaatacatttttaagattctctaacagatagtttacatctcccttaggtcttcaaaatttagtgtatattttatactcacaacacatcttcatttagataagccccatttcaggtgctcagtagccacatgtggctggtggctaccatattggatagctcagctgtagacccttttgccactcaactcaaagcctcataccaagccatggccttcattctagccagtatttccaatattggaaggtcagggccctgatcatttatatttgtacttatattgtatcttcatttcctagtaccagtgctttacaaagagtaggcgatgatgtcttcatgcaggtaaagatgaaagtgtcccaagaactatcagccattccactcacgtaaaagctaataccatgcctatttactcccagacagtggccatggctgaacactttaaacaagcaagcagttgtcctatctgcctggattatcttgaaaaccccacgcacctgaaatgtggatacatctgttgcctccgatgcatgaactcactgcgaaaggggcccgatgggaagggggtgctgtgccctttctgccctgtggtctctcagaaaaatgacatcaggcccgctgcccagctgggggcgctggtgtccaagatcaaggaactagagcccaaggtgagagctgttctgcagatgaatccaaggatgagaaagttccaaggtaaggaatctgtactacctgctccaagcccataaagggccttggaaaaagcagcttttaaatgtctttccgttcaatacgggcattagctgaagtctgcaacctaaaagatttgtgatcccaaacatcagctgttatcagcgcacagtatagattttcacaggatctgtaccaatttatgagagcaaactatcatctcctccttcatccatcctatgcaccaagagggagaaaaacctttaatcaaaatattgaataacttaaacaagaattttactatgagaaaggtgggcttgttgcaattatattcatacattctatacataaaatttgacttaatcggggggccagggaaattcctaaagaaagttcggatctgagaatgaacgtggaataaaagaagtgacaatgaataaaatatttgggtctgtgcagtagaaaggcagagggagtctgtagtgtgtgtctttgctgaactaccggttcttctttgcacagtggatatgaccttggatgtggacacagccaacaacgatctcatcgtttctgaagacctgaggcgtgtccgatgtgggaatttcagacagaataggaaggagcaagctgagaggttcgacactgccctgtgcgtcctgggcacccctcgcttcacttccggccgccattactgggaggtgggcgtgggcaccagccaagtgtgggatgtgggcgtgtgcaaggaatctgtgaaccgacaggggaacgttgtactctcttcagaactcggcttctggactgtgggtttgagacaaggacagatctactttgccagcactaagcctgtgacgggtctctgggtgagctcaggtctacaccgagtggggatttacctggatataaaaacgagggccatttccttctataatgtcagtgataggtcacatatcttcacattcacgaaaatttctgctactgagccactgcgcccatgttttgctcatgcagatacaagtcgtgatgatcacggatacttgagtgtgtgtgtgtaattaataatggcattgccagttccccaatttatcctgggcaaggcaactatacacttgaacacagaaaacatccacagtaagtggctgtgtgctcgtgaccaaaggcgagaacttctccgcttggtccacttatggttcaaagttatggaagaagaatgtgggtctttcaaggaattctgagctctacttgtattgctgatgaaaaattgcatatgaaatataaagcagtgtcattttttggtaactcatgcttatgtttctttcacaataaacgtttaacattttcagatgaatttgcaaatgtttttcttttgctttgctgtaagatcaagtaaatgtgttatggaggttataaactataataatataaattgacccccaaaattaattcacttactaaatgacaaggaaacactgcctgttaaactgataaaagtatctgcctgtatttgttcagttttacccaacaactggaaaacacacattcatctccagtatacattgaacattcgctagcatagacagatgtggccataagacaaatcacattgacatgaaaattgaaataatatacacgctgttctcaaatgccaacagaattaaattataaatcagtaacaagaagaaatctgtaaaatctccacatacatgaaaattaaacaaccactttaaaataaaacacaaatcaaaggtgaacttataaaggaaattataaaataccttacactgagtgaaagtaaatgcacaatatcacaaaatgtgcagatgtagttgaggtttagagggaaatttatagaaa[175 bp omitted]gcctcccaagtagctgggaccacaggcgcccgccactacgtctggt[138 bp omitted]cccggccggtctagcttccatttttaagtgagcaaatgcagtggcaaattaggtaaaaaacaaaacaaaacaaagactacagtagtagtcaatgaaatagaaaatggataaatgttaaataaaattttaaaaattcaagacacgttttttcaggatcaaagtagtaaatcttcagctacagtgaaggagtgaggaaggggtgaattaaaacaatgagtaagcaagagaaaaggaagacagggcaaaatcaagagaggcagagaaagaagagacagagcccatcgtgatggctcaagcctgtaatcccagcacttcgggaggccgagaagggaggattgcttggactcaggagtttgagaccagcctaggcaacaaagcaaaaccccatctctacaaaaataataataaaaaaattagctgggtgtgttggtttgcacctgtggtttcagccacttaggaggctgaggtgggaggattgcttgagccccaggaagttgaggctgcagggagccatgagccatgatcatgccactgcactccagcctgggctacagagtgagaccctatcttcaaaaacagaaaagaaaatgtaacatatatacacaatggaatagtattatccatagaaaagaagaaagttctgtcatttgcatctacagaaatgaacctggaatacactatgcttagtgaaacatacagccacagaaagagagatatcacgtgatctcattcacttggagaatttta[206 bp omitted]gctgaggcaagagaatcgcttgaacccgggaggtggaggttacagtgagctgagattgcaccattgcactccagcctggggtacagagtgaaattccgtctcaaaaaaagaaggaaaaaaaagaactagagagcaaaatggggttaccaggggccggggctggggctggggctggggctggggcagtgaggtgggagggttagggaatggttggccaagatacacacaatttcagctagacaggagaaataaatacaacatggcaacaatagttaataataatattcttgaaaaatgctaagggaggcaattttcagtgttttcataaaaaacatgacaacttttcgaggaaatgcatatattacctaactagatttacccgtttggtaacgcatctacattgcaaaacaccatgacatacacaatcattacatacaattattctgataatttaaacaaaacaagaatcaaactttacatgctcaagatgttccgttttacctcagtgagatctcaaaaaaattttttaataaaaaatagttctgttgaaactctcttgtgaattttcctttcagttgttgtactttattgcccctaaattgctcactggttccttcttaaactttctctttattcatgttctctatttgatgaggagttattcctctggtttatttttgttcttctgcccttgattttcttgagttctttgcacatatttaagataattaatttagtatttggagaggaagcccaatgtcttggcttgctcatatgctattttttcttacgactattatactgtcttgtgtgtgtgcctcattgttttggtaagaaaaagtggacactgtgtgtggcaaaccctggacatcaaattctcacccctgagcaggctttcttgttgctgctggttgtgagttggagtcttctgtttttgttttcattttttgttttgtttgaacctttgtaaactactgtgtaaaggtttcactttctcctgtgtggccactgaagtctctgccttctggtctactaacaatttgatggagatttttaaaacatgcctgaacgcaaacccaaaattctctcaagctctttgccatgggatccctctagggagcttagccaggattttgatttttttttttttttttagacggagtctagctctgtcgcccaggctggagggcagtggcgcgatctcggctcactgcaacctccacctcccaggttcactagccaggatttttacaactctcatttcagccttcatttcctgcttgcatggagcctcgggatcatcagaggtaaaacatagggtttctcagatttttataatcttgcatggacatgtatgattgaactcaatccttggtatacctcagtgctattcaaagcccttactatctcatgtaattctccccccagactcttccttaataggcttttcattctgtcatctgttttccctgttatccctcacccaggcaacttcagcaagtgtatttgtctttaagtgcttttaatgacactggcaccccccaataaatcagcttcagtctgtgtagatctaaaaagggtgaaataaaggcaagcccttgagccaacccttcaaggaaccactaagatagatggaggcacacaaccacaattctttgagaacaaagattcttcatcctgtggcatcagcgtgctggcctgggaatgagggactccatgttctcagcagccatcaagctgcagagtggggaagagtaggtgggtgagtcaaattaccacaactcagctgggtgcagtggctcacgcctgtaatccccgcgctttaggaggccgaaacgggcggatcaccaggtcaggagatccagaccaccctggccaacatggtgaaaccccatctccactaaagatacaaaaattagctgggcgtggtggtgggtgcctgtaatcccagctactcgggaggctgaggcaggagaatcgcttgaacccggaagaaggggcttgcagtgagtcgagatcatgccactgcactctggcctggtgatagaacaagattccacaaaaaaaaaaaaaaaaaaaaagccacaactctcttcctgaaattaagcagcttcttccttcactcacggttcccctggaggttgtaaattattagattcaaattttccacaaaggctgattttgacagttatttcccagtttaatttttgttttaccaaagactacttttaaaattccctaccttgaaacttgcagtgagatcactccattaattttaaacagaattttaaaattctgatattattgctctatatgctctaaatagggcttttgtctatttgtaggaatgcttcctctcagtgcaaattatctagaataaagaagggaagtctgtttctccaaggagaggcacaggaggcagggctatataggtaacctggatgacaaattacaatatgccatggagtatgtggacattgaagatatgcaatattgaggtgggaagatggcttcaatgacttcagaattttcagtcatgggaaaacaagaggtttccttaaattgtgatagcctggccgggtgcagtggctcacacctgtaatcccagcactttcagaggctgagttggacggatcactcaagaccagcctaggcaatatggtgagaccccttctctactaaaagtacaaaaaattaggggggtatggttgcatgcatctgtggtctcagctactggggaggttgaggtgggagaatcacttgagctcaggaagtcgaggctgcagtgagttgtgatcgtgccactgcatgccagcctgggcgacagagtgagatcctgtctcaaaaaaaaattatcttattttagaaacatgtcagaaaaatcaaagaacaagcccagttgaaactacagtaagatcctttgattcaccttcaaggtttctttccacagctgattatgacttgattctgaaatcagagttttgaaaaggaacatagaaaacacttttagccagttattctgctaatcatcagaatcttcacatcatgtccagaagttgcatttatcagaagtggctgaggaggttttgcattgggaatcaaatattctcatcagagaagccccagactcactgaggcaatgtcactgagagatactacagatgacatgatcgtgacatctctgtggggagatcaggtccaggagcctgtctctaactaaggactcaggtgccccagcttatggtgactgacacatccctgtacagagcttgttgccaagaccaccccagtgagtgcttctgtacatttagagcaaaaggcagaacataaagatctcaaacaggagaagagctcagagctgagggtgagcaatagcattgggcaaaataggtttacccctgcctggctctgagccacaccatccatgccccggctggaccaagacagtggcacattaagccaggtgcttggcttgagctcctggctcaatgtgggaccagaaagctcaggtttactgtatacccctgtgtcctagaaacactgtcaaagggagaaattaggacagttctccttagaaactgagccaaggatcacttgaggtcaggcgatccagaccaccctggccaacatggtgaaaccccatttccactaaaaatacaaaaattagctgggcatggtggtgggcgcctgtagtcccagctactcaggaggctgaggcaggagaatcacttgaacccgggaggcagaaggctgcagtgagctgagatcacaccactgcactccagcctgggcagcagagcgagactccatctcaaacaaaaaaaaaaaaatttttttttcagcacgtaaagaccctaaaacctacccaccttgagtaggtatcctctcacctatggaggcctattaggtacagcaaccagatgcttagcaatggggcattgtaaatacagtgtcagggttggaaacattatcagaggatgcccagttcaactccctcttctgaaagaaggtgaaaaggagacgctttttctgaggccacacatatctgacatttctccacagcttagagaagtcacccttcatcccatggaacacacacaagtttgtgagcggagctggctaagagcaggggagatacggaaatgaatgccagttacggtgttaggtagatccgggaagaacatggtgcagcaggaatacgaagtcaggagggaaggtgagatgaggatttcatttcgaaggattcctagggacaccttctaacaactctccctagaccaaaacaaaaacaaaaacaaaaacaaaaacaaaacccagaaaaacaaaaacaagaaacaaaccatgaaaggatcatagtttctttagtgttactccaccgtgcccactgatgaaacaatcatgcttcacagctttttccaatgcattttatcctttattacttcatataatccttttaatactcttgagacagtgtaggaatttgaagtggttgactggatcaaggtcacacacacacacacacacacacacacacacacacacacacacacatcaaataggaaaattatagtcctaattctcttgcatcccagtcacggtagtaatttataataaatactgtttacgtacaacatgatcaaaggggttgcctagatgctgtatttgacgttctcatggctgcagacattctgggaaatttgaaaaacatgtaatccaaattagaattaggtattattgaacctggctgagaagcaggtgtcacaccaatttctctgccttcctttaaagaccaagtttcagacagaaagatcaaactgggttttctttcctttacagtcatcagcaactgctgggtttgtgtgttcaggccagttaatggaagcctgaaggaaaacagagagagaacgccgttaatgctacatgtgaggtctcagctttgttgcatcaatgactaattccccatatggcatcctttgggtattcttgggagtatctcaagccatctctgaggaaacaaaaatctgttccagactgaaaaccgtgagatagcgatttctccattaaatattagaatgtaagacaagatttccactgggagaactgtttgaagtaatattagtagtaaccaacgccactacgtgctcaatgctttacatgcatctcacattacatcctcacaatgggtaatggcattcaagactttataggttccaatactgagggtcaaagtttccaactaaaatatgtttacaggctggacgcagtccagtcccacgtctaatcccagcactttgggaggctgaggcaggcagatcacttgagctcaggagtttgagaccagcctggacaacatgccaaaaccccatctctaccaaagatacaaaaacttagccgggtgtggtggtgcgtgcctgtggtcccagctatttgggaggctgaggtggattacttgcacctgggaggtcaaggctgcagtgagccatgatcacaccactgctctccagcctgagtgacagagcaagaccctaactagaaaaaaaaaaaatttacatagctagagaacagaggcacacttacaccgcagcccatgctcatgtttctttctccaaatcaaagaggaggattcagccacttattttgtgccctctctgcatgtgagtgtcccaattagcatgtaggcacaaatacctttataacctgaaatatggtcatttctgcagtttagttttttttgagcacctataatactgaaggaaaaatatccctggcatcatggagctcatgttctagtggaaggaattagataatagaataaatacattatacatttgaaggtgagaagagccctggggaggaaaaataaagagaataagcaatttggaaaatttgtaatgtttatgggtttttctatgcatctgaaagtttgactcaatatccatatttatgaaaaaattatcacttagagatgacaagggaaaacaactcatagtagggtctccagcatagagtctgtgatctcatttaatctttaagagttctgagataattatcaccattttccatttgagaaaaattggacatgagtgggaaatgagttgcccctcctgtattttattaatgggtcatccggatgcttatacttagtctctaattgaatgctcagtaacctgaatatgattttcctttaaataaggcaggtagaaacagaatgctagatattgccagagctttctacacacgtgacagtgtgaatggaagctgataggcagcttctaaatggcttctaacaatcctcaccttgtatcaatcacactcttgtatcatctttgcctctagcataagcaagacctgtgatttgcttcctttgagatggagtcttgctctgtcacccaggctggagtgcaatggtgcgatctcggctcactgcaaactccgcctcccaggttcaagtgattctcgtgcctcagcctcccgagtagctgggattacaggtatgcatcactacgcccggctaacttttgtatttttagtagaaatgggttttcaccatgttggccaggctggtctcaaacttccgacctcaagtgatccacccgccttagccttccaaagtgctggaattacaggcatgaaccacagcacctggccaaatttgcttctatccaataggcaaatatggtgagatgtcacttttttggtgagcctacatagaattgctacttctgccttgctaacaaactctattgccttgaaaaacctgacaaacagttgctgtttgagagttggagagcaagtcttttcagtgtttcttgctgataactgagggcctcttccagccaacagctctcaaggtactaagacccttagcccaacagcactacaggaactgaattctgccaacaaccacatgatcttagaagcaggctgatttttcctttcccagacataccttcagatttgaccctagccctggatgacatcttggctgcagcctcatgagagatctcaaggacgaccaactaagctgggattggagtcctgacactcacatagactgtaagatagtgtgtcattgaatccaagttggtggtaacatacttggcaacagttaggtaacacagaaaggaagagaacttttgcttttatgagaggaatctaatggatttggaaacatgaaatagactgagaattgcctatttttattctctcgtaatgaggggtacatccaaatggaggaaagaaaatagaaaatattcgtagaaccctttttggtctacgtcaagtataatatcaactgtcatcttttactcaccattgagtacatcctctgctttaagaacgaggcatacattttcaatctcccaagaggaaagactttttttttttttttgtattggaaactggcaagagggtttctcatcatcatcttataggtcctagaccatctcaacacagaattttccccatcacagccaggcgcggtggctcacgcctataatcccagcacttcgggaggccaaggtggacagatcatgaggtcaggagattgagaccaccctggccaacatggtgaaaccccgtctctactaaaaatagaaaaaattagccaggtgtggtggtgggtgcctgtagtcccagctactcaggaggctgaggaaggagaatcgcttgaagctgggaggctgatgttgcaatgagccaagatcacgccactgcactccagcctgggcaacagagtgagactctgtctctcaaaaaaaaaaaaaaaaaaaaaaaaaaaagaattttccccatcaccaaggaaaataagcaacttacccaactaccttaagtacacaatctgggctgatcaagctctcaagaagttttgcaactccatcattgcccaagtgattttgaagcaagttgagtctttctagtgttttgttggtggtaagaacagaggcaagagatcgacagcaggcactggttaacatgcactcttctagcctgcaacgaagatgcacaggtaaggtggggccaaatccttgaggaaaaatggcagatgagatgggtgagaactggacatctactagatccctccaagttttgggcaaaagaactgactgtgcaataagagtcccatttcaaacactagactattatgtccgaggtattgtatttcccaatccacttcctcttgtgcttttcttcagctgttgctagctaaaggcagggatctttctccaccaggcacctacccaatattcaccaacatgcagttgggatgtctcaaaccaccacatagcagctgcattcctgcatcttctattttgttgctcccaatctccaggctcctcagtttttcattagtagcaataactatggcaatatattgacagatatcgctgctaaagaaacagccagacagactgcaaaacagaaacatgagctagagtcatgaccacctgtctccaaagatttatttcacagagtgttaagcattcttggacccgtcttgtgacattcatgaataagggactgcttacagaaacaagagcagtgttaacatctacaggtcacttacaacataccaggcattgttcaaaactcctaatgcacattaaactcacaatgatcacagggctcttatcctggttttacaaacaaggaaactgaggccagaatgttttaagcatttttgtcccgggaagccacatacattcaacctacaccgttgcaatactgagcttggattctgaagaattatgttaggcaacctcctctgacattcacgtttctgcctttcagtactcatgtcaaaatccaacatcgagaagggctaaatacattctttctataaagaggattttaccaaatggtcctttctcaaagcaagcaacgtactcacgattgtccgtgttctcccatgtgacctgccaccttgtttttccattcacgtctcccccattatctactcctacaatcctacttcattgcctcaccacgttggccttcgtgttgattctcgagcacagttggctgtttctctgttaacagctctgcaccgactattcattctgcttgcaagcgccactctagtgatctgtatgactccatccacaaccttctccaagtctttgctcaaatgtccccttgtcaatgaggtgacattgaccttgcttagagatggccataccctaccctcagcactcctgattacgtgcccttaggattgaattaaaaaagtttccatagcagtttttactgcctgatacaggagttgacggcctttctctataaggggccagataatagtttaggcttcaccggccatggtgcctctgtcacaactactcagttttgccactgcagcacaaatgcatgcatgaaacacatgtagatgaatggctgtgttccagtaagatctttataaaaccaggcagagggccagatttggcgcctgggtgatacagtttgctgacctctggtctaacaatacataagtttcttatgttttatttcctatctcccccagtgccaatacaagatccattaatacatggatatttattctgttcactgatgtatcccagccacctagaggagtgcctgacacttaacatatattctttgttatagaatgtatattaaatactgaataatcatattaaagcagattccagaagatcctatttttcatttagtagttataaaagttgggtggtgcattcctgtagtcctagctactcaggaggctgagacagaaggatcacttgagcccagcagtctgagactggcccgggcaatatagcaaaaccctgtcggtaaaatatatagagagttaatgatgtgccaaccacatccatgctttcaaacttagaggaaaataaagggtgatcaataatgtgggcttccatgtgccctatgggagctcatagaggaggtccctatccagctttgggtaggtgatagacaaaatggacagttatacttaagacaattcttgaaggatgacaaaagaacgtgtttggagtctacagcaaggttcaaactatggtctgagagccaaatctagacaactttgttttttatttataaagttttattggaacatagccacacccatttgacatttttcatggcctctcttcagctatgggagacttaaaaatagttatgacagggacattatggcccacaaagcccagagtatttactgtctagcctgttatagaaaaaggtttctaacccctattctacagtatgagtgaatttgtctcaacctactaagtacaaactaagggccatgaaaaaaagggagggtgagttatattattttccccaaggcagctttccctaaactgccttgtcaaaggaagcaagattctagaaagaaaagatatccctacaatttcctattttacctgcccatttgtaccaaattacaatggtaacatggatttaacttataactacaagacagaaataaagataagataccatactgctgagcatattcttatacagtccagtaagcacttcagttcaggagctcacaagccatagtgttgctattttatgaacaggagatgcttttaggttatcagtttcttatatttctgagcccaaaaaaaggcatttgaaatagaacattttcaagagagttcaaattaaacaactccaaggcattttttaaacaatttttttttcaggcaagtgggagaatcactacttctgagaaaatacgagaagtttgattattcagcatcattgatgaggcacactcaaaaaactgtagtggcttgttacatattttttcctggaagttcaatcagaggccattgcatcatgcctaaattagatgtctttggtaggtaccagtggcttggatatggccacctcccccaatgcatcccttttccaataaagctatttcccaacagaaagatgcccccatgatcgccaaccccaaaagatattcactgcctcagaaattgcaagccaggccagggcaggatctttgggtcccttctcctgtggcattttcccatgctatgtccacccggggcagggggaggggtccggcccaggcacccttctccatgtgataaggatctgagggattttgtgaactctgctccttctgagctaaaaggttttgccaatgaatcttaccgtgctttcatgtcgcctattctggggagcccatgctcccgtacccctatcacccatgatgccatcactggaatcttatccctgccaccaaccccaccacccaagccctcatgcagtagaaacacagtcatccaggacaactgtgggagacttactgaagctcctctaactgacaggttggaaacagcaagggaaacgtcacatgcaacactccgtaattttttaagcgattcacacacaggtctagttgtcttagagttgggctgaacagaagcactcttccaagggcgctgcagcaattttcagtgagacagcagaagactaacctgcacacagagaagagtgagtcagtgacagtgtgagcaccagagaggggagcacctgagaccacccaccccacgcccacgggcgcctcgatgccttctactgccattgccccaaatctctaccaatgactttcttatttggaaaaggagattagaagtaccccaaatagtgcagaggctgaaatacagaatggatgatgcagaacagggcatgagaaaaatctaactccaacttctactaacggaataatcttatagacgttacttctggaacttggtttctcccatcgtttgataaagtatatttggctaaattgaatcctaggattttcagtttaaaaactcactttgaaagagttactttattatttataagtgaatacaggaactgttgaagatttttttaaactgggaaaaagtggagacagacggcacaccagaagccctgttgttagcccattttgtggtatcccgttttgtctgtccaggtttagctcgttgccaatatgtggaagtttactcaatcctaatctggatttccagcctctatttttttttccattatttatttttaaataatttttaaaaatagagatgggggtctcactgtgttgcccaggctggtcttgaactcctgggctcaagtgatccgcctgccttggcctcccaaagtgccggaattataggcgtgagccaccacacccggccgaatctctattttttttaacccgttttctgtttgccctgggaatactgcactggcagtgagctgcacttttttcctaaacagggaaggggttaaaaagttggaaataggccgggcacggtggttcacacctgtaatcctggcaccttgggagggggagacaggaagatcacctgagttcaggacttcgagactagcctggtcaacatggtgaaaccccgtctctgctaaaaatacaaaaattagccggcatagtggtgtgcacctgtagtcccaactacttgggaggctgaggcaggagaactgcctgaaccggagaggtggaggttgaagtgagccgagattgcaccactgcactccagcctgggtgactgtctccaaaaaaaaaaaaaaaaaaaaaaaaaaaaaaagttgaaaacaaccaatttattggttggaaatactgaatcttggctctggtatgggaaaagggtacactagaccagaggctggcagcacaccaaacctggcccctccctgcttttgcacagctgcaagcttagaatgatttttgtgctttaaaatgatcggaaaatgtatatgtagttattttaatttgggtttgacacgtgaaatgggctaggttttcctttgtatactaatgcgtgcttattttaaattatatgtacaagtaaaagttaagactaagaatgagctagagaagttccctgttgtcctcgtagaaaccagcactatcaactcatttgcatactattttccagctgtcagatttggtcacgaccataaatttggccttttacaggtgttttcctcagactactgtgatttctttcacgttcttaggcttagaaattccttgcctatttaaaataagttaccaaaacaaatattttttgcttagtatatctggattattttaaatacaggtatgaactacgaaaaactccatgccaacaatctaaggtgataaaaatgttctaaaattatattgtagtgttgtacaactctaaatatgcataaaaaacatcgaatgtgtaccttaagtggatgaattttctgatatgtaaattatacctggaaccagtgggaaaagaaaaaaagaaaaaatctagcaggaaacaaaaaacttgtagatatgagatgaaaaaaatatctatttggagtctgattattgaaccaatggtctgtcccttttttcatgagaccttcttttacaacaaaattagctcatattgacaattacttactggatttatctggggccacatggatcttagaacaatttgagattttaaagacatggc[179 bp omitted]gaggcaggagaatggcgtgaacccgggaggcggagcttgcagtgagccgagatcgcgccaccgcactccagcctgggcaatacagcgagactccgtctcaaaaaaaaaaaataaataaaagcatacataatgcgatattacataatatgaacaggagtttctggtgttatcctgcaatcaaacaagtattttttacagaaaatataaagaatataaagaatattatatcagtttgtattatgttttggaatctagcaagtcctaaaaagggggcgaaaggagctaaagggagccaaaaatgggcgaaacaaaaaaacaagatgacctactgcattcttttgtctttttggaatttggaattgtgaacggggaatcatgtccttaaatacaccgagctacttactgttttgttttctgaccatgttttacagatctccgcccttcatttttgtacctttatgcctcacttttgccacttttttgccatctttcatcgtgtttgccatgccccaaccttccggaagtctgcctttctagccactttcccagagcagacagagcttacctacgagtaacccacagtcggttacatacagggagagcccgtcttccaccttcttgaaaggagactcaggggaaaaaatcctatttcaaggcaatctagcaccaaacctttcctttgctttcgtctttgtgttctcagtcacatctcatcctacacgacacccagttcacgtgttcactgtgagaacaatataggttccctgctcttagaaagtcagttgctatggcctaggtgctgtgtttagaatgttgtgaccaccattttttattttttattttttttgagacagagcctcgctctgtcacccaggctggagtgcagtggcacaatctcggttcactgcaacctccgcctcccgggttcaagcaagtctcttgcctcagcctctcaagcagctgggactacaggtacccgccaccacgcccggctaatttttgtatttttagtagagacagggtttcactgtgttggccaggctggtcttgaactcctgaccttgtgatccgcctgcctcggcctcccaaagtactggaattacaggcgtgagccaccgcgtccggccgtgaccaccatttttaactcttatctccaaagatgtatgtttggtcatgttatgactccactgtccagattgagaaatacaagttgaaaaaaaatccagaaacatttttgccaacgtttcgcaaatcagctgtcaacccagagtattaacccagacctactgaactccaaagactgtgctttcggctgctttgctttgctgtccctttccccaccactgctctttgatcatgtgcttagatattcaagtcagtctgagcttctacgtggtgagctcgtctaagccaacttacaccagtgatataagagtgcagttgggatgaagcaaggcatcacacagtatgttcatcccgtcgctcctcagcggattgctggataaggtcagttttctcagactcccgccactgatgaggagagaggcgatttcttcacattcgctggctcgcaaatcacatttcatcaagctgtaagaggaattcagaaatgaaaagaggctcccgcgtttaagctatcccctcttttaaattaaaaaaaaaaaaaaagagagacctaaccaagtgcgatgatgtctacttggaaataaatagatccctttgcttctaacctttcttctccctatgccactcctcagagttcaaatttgggcaaggttacagattcacgaagggctgtgagcaggcagttccttcctcttttgcattcatctccatgtggtttccagggtgatggttcagaacggtaagtcaggtatcaagcatcccacctgaccatgggatgtgggtacgatcacatttataaatctgatcaagaccctcaacttaccatcacatttacaaggacttctgatgttttttctgcatagccttgggtgccccacatgctctggctctcaactatctctattttctttttttttttgagatggagtcttgctctgtcgcccaggctggagtgcaatggtgcgatctcggctcactgcaacctctgcctcccgggtttttaagcgattctcctgcctcggcctcccgagtagctgggattacaggcatgcgttaccacacccggctaatgtttgtatttttagtagaca[131 bp omitted]cattctgtaccatcctccctgatctcctcactctccctcaagtccacaagcatatttttgctttagtgtctagtacccttatctctacttagtgattttccccatgggaccctattttttaaaaaaagtttttttccttaaattatccaggagtggtggtgcacgactatagtcccagctacttgggagactgaggtgggcggatcacttgaactcaggagttcgaggctgcagtgagctatgatcataccaatgcacttcagcctggacaactgagcaagacgcatctctaaaaaaaaataaataaaataagtagaataaaaataagtgatctttccccagatagctgcatggtttgctgtctcactttcttcaacttgtcactcaatattctcttcttcaatgaggattttgaataataaccatctttcaactaacaaatattgttattttcaggcattgtatgaagttcctgggatacagcagaaaactggaagaaatacgatggaattctagcattgtaaagacagggctgaatgtatcatgtgcctagtagatgatcagttctttatagaaagtaaatcagagtaggtcatagagaaagaaaaggatgtattctacttccttatggggcaggcactgagcgaagactctcactgagccatcgtacttggcctgtgtattctattttgaatgaaatggaagcccttgagggtttgaagattagaggacagaagagtcagaagctctgacttaaataaggtagaagaattttaacagaaacttgagagaagagggcaagctctgaatctctaggacaagggaatttctgtcagaggaaatgagtggaaagagtcagaagcaggagcaggtttggtgttttaaacatctacaacaaacagtgcagccgcagcacggtacataaacaggagatggggagagggttagccagggccacccagcgtgaaatggtgtattctatattattattattttttttttttttgagatggagttttgcccttgtcacccaggctggtggagtgcaatggtgtgatctcggctcaccgcaacctccgcctcccaggttcaagtgattctcctgcctgagactcccgagtagctgggattacaggcatgcgccatcatacttggataattttgcatttttagtagagacgaggtttcgccatgttggtcaggctgtctggaacgccttacctcaggtgatctgcccgcctcggcctcccaaagtgttgggattccaggcgtgagccgtcgcgttggcctgtgtattctatttggaatgaaagtgaaagccgttgagggcctgaagattaaaaggacagagtcacaagatctgacttagattgccattatccttagcaaactaacataaggacagaaaaccaaataccacatgttctcacttacagatgggagctaaatgatgagaacacatggacacatagaggggaacaatacacactggggccgacttgagggctgagattcagaggataggatcagaaaaaataaaaatatctatgaggtactaggcttagtacgtgggtgatgaaataatctgcactaactcccatgacacaagtttacctgtgtaacaaacctgaacacgcatccctgaagctaaaagtaaactaaaaagagttaagtctacccttgtagtaaaactgatatatcaaaaaataaagctatgttttgcttcaaacacacacacacacactcacacacacacacacaccggaaaacaaaacaatccaaactagatgaaagttgcccttctacactcttttccatgtagcaagcaaaggtgtggacaggtaggaagatgctgaagtactgcagataggtgggagatgggttggtctatcatgcttagcagtaaaggaagcaggaaggagtcagatggatccactctaacaacagacctagaaaatttgtctaagccaggccacaagaaaatctgtatttgaaatgcctatttaaatatcaaagtaagaggctgaggtgggcagatcacgtgaggtcaggagtttgagaccagcctagctgacatggcaaaaccctgtctctaccaaaaatataaaagttagctgggtgtggtggtgtacccctgtggtcccagctacttgggagggtgaggcatgaaaattgcttgaacccgggaggcagaggttgaagtgagccgagatcaccccactggactccagcctaggtgacagcaagactttgtctcataaataaatatcaaagttgatatctctacaaatacttcactgagtctgaaaccaggagaaatgtttgtaaataagtacctaagagtcttcatcacatagaggctacttaatgccatgaataagaactcatagaaggggtatagaaaagacatttagaaccacttggaaatatcccaaagataagagtccaggaagatgaaaaacaagtaaagatgactgaggaggaataatcaaggtttgggaaaaaccaaaggccaagaggaaaatgtgttccaagatgaaaggagtttggggaggggggcattgaggtaggggagaggctaactacaaagtggcaacagagttgggatttagctgggagaatgtgatagggagaagggatgctgagtgaggtggaaggcaatgactctcaagaaccatggaatttgaactatgtcagaaagaaagtgaggggctgggtgcagtggcttccagcactttgggaggctgaggtgggtgggagaccagcctggccaacatggtgaaaccccatctctactaaaaacacaaaaattagccatacgtggtggcaagctcttgtaatgccagctactcgggaggctgaggcaggagaatcgcttaaacccgggaggcggaggttttagtgagctgagatcacaccactgcactccagccagggcaaaaagagtgaaactctgtctcaaaacaaaaatgaaaacaaaaacaaaaagaaagggatgaagggggtgaaagggtgggaagctgctgctcaaatggctgaaggacgcagtaggattaaagggtgggaagatttgcttacaagacaaagcagcttgagaatacaggaggtgccgttagagcatgaggtacttgaaattgagagtacaagcgaaatgtacttattggagatgaagtctagcaagtggtattatccaatattgagtcaccagcaagtagagctactgagcactcaaagcgtggctagcatgactgaggcactggattgttagttttactacatttacattggaatttattattcatttatttatttattgagatggagttttgctcttgttgcccaggctggaacgtgcagcggcgccatctcagctcactgcaacatctgcctcctgggttcaagcgattatcttgcttcaccctctcgcatagctgggattacaggcacctgctaccatgcctggctaatttttgtatttttagtagaggtagagtttcactatgttggccaggctggtctcgaactcttgaattcctgacctcaagtgatccacatcctctgcctcccaaagcgctgggattataggcatgagctaccaggcttggctagtttaaatttaaaggttgattccaaattattggaagatttaagtatgtttaggacacgggcatgtgaattagttctctcaattgtaaattttatgaaatcaatacggaggtcaaacatttctgatgaaaatgtgcccgagcggcgatgttctctgtgaaatactgggttctgcagccttttacaaaaaagggaatataaaatcacatcaatagctttttgcattaatgacatatggatataatttgatatgctgggttaaatactgttaaaattagtttcaaggctgggcacagtggctcacacctgtaatctcagcactttgggaggctgaggcctgtggatcacctgaggttgggagtttgagacaagcctgaccaacatggagaaaccctgtctctactaaatatacaaaattagctgggcatggtggcacatacctgaaatcccagctacttgggaggctgaggcaaaagaatcacttgaacctggaagtcagaggttgcggtgagctgagactgtgccactgcactctagcctgggcaacaagggcgaaactccatctcaaaaaaaaaaaaaaaattagtttcacttgcttccttttactttttaatgtggctactggaaaatttcagtttgtggcttgaataatttccactagacagtgttttagggtttgaccagtagtctacttcagaatgaccagaggaattagatcattagagaaatatcagtcaagggagggagaagccatgttatatgaaatatcaatgtagaaattgaaatcaaaaggcaggaataatgttggtgaaagaaacaaaccacgtgctaaaaaaattgaggaatgagtgacatcaaaaggtaggagcaggtagtgttattgaaggggcacctctatccaccaacacccaggcattcccctcacatgcactgagctttcagccgagcaacaactcacctcagatgacttatttggcatgtgggctcgtgcaggatgtcatgcagaagtgaaaacatatttagggaaatggacgtacagttgatactcaggtatgtcaggctccgattacgagccaaagccttgagtaagtcttcaaaaccagaagcagtcgagacataggacaacctgtggaagacataatagcaggaaagcactagtgaaggtctgaacatcttctccacaatttctcctgcctgcctcacttcatcctgtaacaaagattctcagtggattacatcctcacacatggctctcgatcttaaatttctagtcaggtcagaagactattgctaattccaaggtcagcctgttgactttgaagtaatcccctgggtctttatggtgtgttcacctcatgacctttcttaagtgggacccacaagccggatactaagaatacatccacatgcacaaagatattaagatacatccacatgcacaagtttaaccatgtttttctacactgagagcaaaagacaaaatatgctgatggctgataatagccacacaatcaaccacatgtaaattactccgtttcagcagtcccagccagagcaatcaggcaagaggaagaaataaatggcatccaaataggaagagaagaagtcaaactatcactgtttgcagatgacatgattccatatccagaaaaccccatagtctcagccccaaatcttcagctgataaactgcaaaagtttcaggatacaaaaagaaaaaaataaaatcaatgtacaaaaatcactagcattcctatacaccaacgacagccaagctgagagccaaatcggaaatgtaattctatccacaattgctcacaaagaatacctaggaatacagctaaccagagaggtgaaagatcaaaaggagaattacaaaacactgctcaaagagatcagatgacacaaacaaatggaaaaaacattccatgctcatggagagaagaatcaatattgttaaaatggccatactgcccaaagcaatttacagattcaatgctattcctatgaaattaccaatggcattcttcacagaaactagaagaactatttaaagttcatatagaacaaaaaaagagccccaatacccaagacaatcaatcctaagcaaaaagaacaaagctggaggcatcacgctacctgatttccaactatactatagggctatgataaccaaaacagcatggtactggtacaaaaacagacacatagaccaacagaacagaatagagaacccagaaatgaggccacacaactacaaccgtctgatcttcaacaaagctgacaaagacaagcagtggagaaaagactcccttttcaataaatggtgctggggtaactggctagtcatatgcagaagactgaaactgaatgccttcttcacaccacatacaaaaaccaactcaagatggattacagacaaaatgaagtgcaaaactattaaaaacttggaggcgctgggcacagtgactcatgcctgtaatcccagcactttgggagactcagatgggcagatcacaaggtcaggagttcaagaccagcctggccaacatagtgaaaccctgcctctactaaaaacacaaaaattagctgggcgtggtggcgggtgcctgtagtctcaactacttgggaggctgaggcaggagaagcacttgaacctgggaggcggaggttgcagtgagccgagatcatgccactgtactggggaacagagcaagattccgttataaaaacaaaaacaaacaaaacaaaacaaaaactaggcaataccattctggacataggaatgggcaaagatttcatcatgaagataccaagaacaattgcaacaaaagcaaaaaatgacaaatgggaagtaattaaacagaagtgcttctgtacagcaaaagaaactatcagagcaaacagtcaacctgcagaatgggagaaaacctttgcaaacaatgcatctgacaaacgtctaatacccgcatctataaggaacttaaatttacaagaaaaagataacctcattaaaaagtgggcaaagggtataacagacagttttcagaaggtgacatacatgcagacaacaagcatatgaaaacaagctcaatgtcactgatcattagagaaaagcaaatcaaaaccacgagataccatcttacaccagtcagaatggctacgatttaagaatcaaaaaataacaggctgggcgtggaggctcatgcctgtaatcctagcactttgggaggccaaggtgggtggatcacttgaggtcaggagtttgaaaccagtctggccaacatggtgaaaccccgtctctaccaaaaatacaaaaaattagccagcttggtggtgcatgtctgtaatcccagctactcaggaggctgaggcagaacaatcacttgaacctgggaagtggaggttgcagtgagccgagattgtgccactgcaccctagcctgggtgacagagcaagactccacctcgaaaaacaaattatgtatatatatatatgtgtgtgtgtgtataaataaaacagatgctggcaaggatgttcccactgttggtgggagtgtaaattaattcgaccattgcggaaagcagtgtagtgattcctcaaagagctaaaagcagaactaccatttgacccagcaatcccattactgggtatatacccaaaggaatacaagttattctaccaaaaagatacatgcacatgaatgttcaatgcagcactattcacaatagcaaagacatgcaatcaacctaatgcctagcaacaagattggataaacgtgatacatatataccatggaatactatgcagccataaaaaagagagcattttttttttttggcgggggcaggaatatggagttggaggccattatccttagcaaactatcacaggaacagaaccaaatactgcatgttctcgcttgtaagagggagctaaatgatgagaactcatggacctgaagaggagaacaacagacactgaggtgtacttgaggggaggagggagaggatcaggaaaaaataaatgagtactaggcttagtagctgggcgtacagtcttatagtctatatacaaaatatgtacgtcaaacctgtgacacaagtttacctacataaacaaacttgcacatgtaccactgaacctgaagttaaaaaaataacaattcacggctgggtgcggtggctcacccctgtaatctcagcactttgggaggccgagacaggtggatcacgaggtcaagaaatcgagaccatcctggctaacatagtgaaaccctgtttctatttaaaatacaaaaattagccaggcgtggtggcgtgcacctctagtcccagctactcaggaggctgagacagaagaatcgcttgaaccctgcaggtggaggttgcagtgagctgagatcacgcactgcactctagcctgggtgacagagcaagacgctgactcaaaaaataataacaaataattcacaatttcattgaggaaaaagaagttgtcctagagtcccaccaccaccaccggccctcacccccaaccccggaagaacatttctcattactcccttggagttgcagcaggacatcagggcaacagctttggtcattgtctctaagggccacctagagaaaagagttaggaatctccaactcaacattaaaggaaagagacgggaagggaaatgtggaagctggccaacccttggaggattgaggatcctatggcaaatccaggcatagaacacacgggaagcccttttaatttacttcccagcctatgtggcgactcggtgggagactggatgttttccatgttgccgtattttcagagtcctttacctagcaattctcctgatccccattttacacaaacaacttctctcccaagtctttgccccatgttgcaacaaaactgtttaaggttttgtttttttttttaaatacacacaatggagtctcactctgtcacccaggctggagtgcagtgccacaatctcagctcaccgtggcctgcgcctcccgggtttaagcgattctcctgcctcagcctcccaagtagctgggattacagttgcatgccgccacacccggctaatttttgtgtttttagtagagatggggtttcaccatgttggccaggctggtctcgaactcccaacctcaagtgatccacccgcctcagcctctcaaagtgctgggattacaggcatgagccactgcacccgccctaaaagtcttcagttctcctttcatcattttcaattaggcttttctgctctcactacccttccagaactgttcttggccaacaatgacttctaccttgctaatgtcattggccaattctcagtcttcagtctccttgaataaggactgccatctgacacagttgacctttccttcgttgggaaacttgcctcactgggatccgaggataccacaccctttactttaccttctagcctaatgaccactccctcaaaggccttcgctagtttctgcttttctccccaatcactttatgttggagaactccgggcatcagtctttggatcgttttgcttcctgagcaacattcctatccttggtgaactcagtccttggctttaaatacacatttgtgttatacacatgtatacatgaacgacacccacattttaccttcagttcagaaacattacacactgctctctggacacctaatagacatcacagctttagctcaaacaactttagactgaccttcctcagattctggctctcgccgtcatttcccaactcagtggcaactctcacatggcagttttcaaaacaaagatcttgggacaattctctctcctagtctagatttaatcaaggaatcatcctttgtcaacatatgccccggagttcgcacctcaccaacctctactattcacaccctcagaggcaccattgattctcacctggcaaatgccaagaaaaagagcctcctctgagctttcagattctgccctatgctccccgattggccatttttaaacgcggtatccagaatgagcttcttaaaatgcaagctaaattatggcatctctgctcaaaacccctcaaaatgcctcacctcactccagaaaacccagtcctgacactggtttacaacaccatgatcatgccatacatacttgtgagccatctccgtaatacccttcctgcctcacactggtctaaacatgtaggtctctgaactcaaagcctttgtttcatggatccctcccatcccaggggatgaccaacagtttatctggctcattctttcacctcattcaagtctttgctcaaatctcactttctctgtggaacttattactacagcctgtaccctcccacacccctaaatacccacttatgcaccctgaccttgccattcttttccccccgtaacaccattatcctaaaatactttaaaatgcgtgtacttattatgtctgcctatattctgtctcatcagatagcaaacaaggaaatttgtcttttttccccccattgatatatcctagtgcttagactagcacctcaaacaaagtaggcattcttcttgaatgaaaataaagttaactcctgggcttccagaatcctaagatcatatatgttgatgtgtactgaatattttagtgccatttcctatagagctattataaactcagataaatactaattttcccagtgactgtttaggcaagtacagctgcttttcacctgattctaacgcattctgtaggaaagaaactgttagactcctaccctgacccatttttgctttcttccttaggataaacccacttgttactatttcttcctgattccaagagactactttcccagtccccctttgtagttatatgaagccgtatgaagacaaggtaaacaggccaatgagatgcaagcagaagtgatacaagaaagagttttgaaaagactccatcaaggaagctcctgaagcttctagataaacctttccttctcccttctgttgcttcctgccttgaaggcagccatgatggctgggacctcagatgctactgtggcctaaggtcatctttatcatagacacactaaagatggttgagaagtacagaaggagcctaggccctgatgagcctgacctgaaagtgtgttttgtatattgtcttctcccagagaaagaaaaagaccaccgttattcctaggggaacctctaaggcagaggttgatatagtacttacttgagtgtgcgaagtttacagctagaatgctccagggctttagacagaatcctttctgaaataccattaaggtcattgtcaaagatatgcagctcccggaggctctccattgtataaaaaagagagcagatctctctccagtagacaaggctcttcatttgactacatagaagaaaaattgagttttccaatggaatcgattcaactccagcaatttgtaaaacatgtaaattaaagtatgttttgagagtgcctgttgtctgactcagatttaataccatgcagcaagaaataaagtagggtcaaacatgaatgaacaacactcagatccattaaagtagctggtgattccatattctgataagacacatctgagtgcagggcctttaaatgcgagattattaaatatttttaaacttcaatattaaaaatcaatgttgcatgttttgtgctatcatgaatactcctataatgtaacaatacaaggtttatttctttttaatctatacaacagatctgaagaaattaggttaaaccactggtttgcaatgaggcaattctgccgctaagcagacatttggtgatgtataagatttttgttgctgtcacaaacggggaaaaggggaccctactggccacaggagagaccagagatactgctaaacctcttacaatgtgcaagatagacccccaccacaaagaatagctggcccaaaacttcaacagtgctgaggtttaactcaaactttgagtttaaacagaagcagagagatttaagtcactggtctaattagaagctagattggaagtcaagttcttcatggccccgagtttgtcttgttctggtcaacaagctctagaattatgggcaggtcttaggaagacaggaaagaggatttattttttaaagactcacctagcagttggccttataagtggctctttgttttgaaagatgcgctgaacactcaacttaagtgtcctcaggtgacagcagtaatccagacagtataatgagaccatcatatccttgtctgattgaaggtaaactgtaacctccatgagagcatccacaatcgtcttcacaaattcttcttcccgattctcatagagacagtaaaacaaaggcatatggtgcgtcaacttttccgggtcacggtccaaatgtttcatgtatcccaccgagtaccacttgaagctgtctaccatcggtagctggtatccaaaggatgtctcaagaatctttctcctgtttgcatttagaagaccaaaaatgaaagtaaacacttgattaaagtcagagtattgttctctcttctctttatactctctgctgcctgaggggatcagatagttgggtactgccatcagaaatgcaatggctgtacaaaactcctggacgttcaagtgtatgaacttgtaacggtctttatgagtgttgctcggcaaaagaatattcgcggcctgcaacacagagacatcagcctcagtaaacccaacacatctgaggtcttcaccactgaaattcagggtgctcagaaacagtcctcctgcagccagcaaacacagacgttttaggagacctaggtgatactgattggcagtaagtccagcctctgatgtcaacgcatcagcaagaaagtgggcatgtagatcagtgggtgtttggcagcagagctggaagtcacgccccttgtccatctgccgcttcaggacagtacacgtgatccagcataagatggcgactcggcacagacccacgagtatttcatcctcatgtacaagctggagggctgccgacgccctctggcggtctttaaagaaagagttaaaatatatctccctcttcccattcgacagctgcaaggtcgtgcagcaatctacctctttcaagaacgtttttacattattcccacgtgtgggccttgaggagatgaggaaccagcagcctggagccatttttctcttcagcaaactgaccaggagaactggaatgggaactttctgggtgctgttactacacaaagcactttcattgacatttaactcgaatcttatgttgtccaagtcctcgaggatgaaaaggagtttcttgggatcagacaggatgtctgcaatgggagcctggccgtcaggccagtccttggcgattagctcagccaagctgctgttggtcatctggtttatttcgtgagcagtgaggtgaacgacgtacgagatcatgttctgccacatctcacccttgatccacctcaacacagccagatttataacaatagtttttccagatgctctctctcccatcaggaacacattgagattgtttgctgaataatagctggtagaatcataggctaattgaagtatgtagaacacatctgacgaaacgtcacgaaaaaatttataatgaaattttccaaaagtgtgactttcccattgcagcatgaattttctcctcatgacagctttgcatgcctcctgattgcctaatccagcgagtacagggcagaaaatacagaacaaagatgaaagttcaagatgtaaaaacagttttagcttcttttcatgtttacagtaaaaatatagtagaaatttttacttactactgcttatcacaaagatataggtacaaagatatttaccatcatgttgcttgtttttgagatggagttttgctcttattgcacaggctggagtgcagtggcacgaactgggctcactacagcctccacctcccaggttcaagcgattctcctgcctcagcctcccaagtagctaggattacaggcgtgcaccaccacacctggctaattttttgtatttttagtagagacagggttttgccatgttagccaggctggtttcgaactcctggcctcaggtgatccacctgccttggcttcccaatgtgctgggattacaggcatgagccactgcgcccggcccatattgctttaaaggaaaaaggttgaataaaacctattcaactcatacagtggagtcgacagatctgttttagctttgttctttatccttcaagggcttccctctcatgtcttggcatcaagaacatatttctttcctttttgggggttccttagcgttttaggtagccttcaattatgtttcatttcatacccagtttttcctttgaggcaataactcgagttcagggactgtttcctggtacgtattcagctcaaagtatctattacatcttggcccatcagtcatgagttacacgttcatcttcccttctatttttttgtttatgcatatcattactgaaatcctgatcatttaatgaactacttaagataaatgaaattgtatggaataaagttaaaatttatcgtaaagggagtcttatttcttgagaatacacaagattgcactcccactgcaaaaacaaacaaaaatgttaagacataagtataaagctgtcatagaggtatgatacagaaatgatccaaataagtgaattcctagagggggatgactccttccttagtgagcagatacttgaaaatgtttttatccctgggtaagggcaggcaaaagagggagcctggcagcatggaagaactttgatgggataaataaaagccaatgatgaacagctgcagcagggctggtgtggtggacctgaatgtactggaatgtggcacactggctcccccccagtggagatgagcctgatggatcaacgggcctgatcccaccctctagactaccagggctgcctagttccgacctagcacatctcaacagcctggcagagacaggactttctccttactgtttttatctatgacgtttagtatacaataaaaaaattgagattcaaagaagcagaaagccatggtgatgagtatggttcatgattataaaccatgattcataatcaagaaaaaaaaatctttggaagatgtctatttaggtgtttttctttttgccaatttattgattaggttatctgttttcttgttatgcagttccttatatactttggatattagttccgtatcatacatagtttacaaatatattctcccaatccaggagtctcttcactcatttccctttgccattcagaagctgtccagtttcacacatgtacacacacacacacacacacacacacacgtaagagaataaatatgtgagataatagatttgttagcttcatgtcaacattccacaatggaagcatatcaaaacatcacattgtcccatataagtatgcataactatttgtcaaaagtaaaattaaaaaaaaatgaatagaagcatatgtacggataacccagcttttggaattaggaggtaattttataataagtttcatattatgcatatatccccatatattaggtatatagagtataagaatcagatggatgctctgtaacttaaaatatacactatgcaaaacaaagaattcattggaatggctgaatggcagatggcacacacagaagaaaggatgagggggcaccagcacagatcaatagaattggcctaacaagcacagaggaaaaacaatcacaaaaccaatcagaccatcagggaactgtgatacaatatcaaaggaccagtataaaatacgtgtaattacagtcccaaaaggagaggggatgaaaaggtattcaacatcacgaatcagaaatgcaaataaaaatcacgatgagctattcccttcacacctgttagaatggatattatcaagaagacaaacggtaagtgtgggtgaagatgtggagaaaagggaagccttgtgcacggtgtgtggggctgtcaattagaggagtcattacgaaaaatgatgtggaggttcctcaaaaaatgaaaaatagaactaccctaggaccctgaagctctttcttgagaatcctttgtggtcagaaaagcctgtcaaggacgtttttattttctataaacttagttcaaaaccttaagtttattcttcagtccatttctcccttgtcaccttttatgatgagcaaaaccaccaccaccaggctgcatctttattgtccccctaaatctccttatcttcaagttaataatgtgcattttccactgttatttcaggaacaaccttgctaaactttccaccagttcaggttcccacctgataaagtccactgaaggtcaaaggcatgttgaaaacttattaaaatggtagagggtggccaggcacagcgactcacacctgtaatcacagcactttgggaggcgaaggcgggcagatcacctgaggtcaggagttcgagaccagcctggccaacatgctgaaaccccatctctactaaaaatacaaaaattagcccggcatggtggcaggcgcctgtaatcccagctactcgggaggctgagacaggagaatcacttgaaccaaggaagcagaggttgcagtgagccaagattgcaccactgcactccagcctgggaaaaaaaattttttaaagcagaggaaagttacaggtcaagtagtttcttgacctgtagtttcctctaccctttaattacttgacttgtagtttctttccccactgaaaatttcaaggcccatcaggcatctaccaatttcctgtcccaaattccaaagctccatttgagttttgttttccactgggagcagtctatgtaagtactaagaccttttgcaattactactgcgatatgtcgagccatcccagaagaggtactgggtgaagaaagtgaagaaaagaaatcatatctgatattctcttaaatatctgcaatttggagagaagtaaacagagcaggtgagcatgtacctcatgaggaagggacagcacaacagtcttgagaataagatgatcaagagaagcaggaaggatttctattttctcagggccctgggcagaggaggaggggaaagacattgcaatgtccatggaagtgagaaactcactgagtggactcagccctgctactgacatttaaagggtcaccatggaggacacagccatggtctccaggaaagccttctctcaaacttgggttcacttccccctcattgaaaccctcagtagatagtggtaaaaatgtaaagggtaataagagattacaacatggcctaggaggcatgttcagtagactttacgccagactgatatcagtctgtggcctgttagggactgggccccacagccgatggtgagtggtgagtgactgagcactcctctgtatttacagccgctccccatcgctcacattaccacctgggttctgcctcctgtcagatcagtgggagcattggattctcacagaagcgtgaaccctattgtgaactgcacataggagggatataggttgcaccctccttatgagaatctaatgcctgatgatctgtcactgcttcccatcaccccccaatgggactgtctagtggcaggaaaatgagctcagggctcccagtgattctacatcatggcgagttgtagaattatttcattatatattacaatgtaatagaaataaagtacataataaatgtaatacatttgaattatccccaaaccatccatctccaccccttctagtccatggaaaaattgtcttccgtgaaactggtgccaaaaaggtgcgggaccactgctttacactataccaggacaagctatacattttggacacagttgtccataagcttgagctagataagaaaagagaagtgaatgacaggataaccatgcaactaaaaaaaaaattactaattctggaagaaaacactcaaggaaggaaaacaagtttaccaccatgtcaaggtacttaaagtgtaatttttaaaatatctaaaatatgaagtgaggcatggttagagaagatggtagaccagaagctggtagtgtgcaccgctctcatggagagagaacagagcagcaacaccagcttttcaactggattatctaggacacacgggattcatcaaggaagccacacaacccacggagaacagaagagtgagacaggacagccaccagcccaggactggcacacggcccaggaaggctcctgaccacagggagatggtgagtgagcaagagtccccacggattgttattttacagtgtatatcaaaacatcaagttgtacaccttaagtatacataatttgtatctgtcaattacatcacaataaagccagaagcatgtaggtatggaaggaaaaggtctaagaaaaatgtatggcctcaaaatagagaacatagacagaaagatcaaattcaggttacaaaaaaaaatccttgtaattatggagtatgtaaatatgggtgacaaatgttttaaaaagaacattcatatgcacccctattaagcttttaaactttaaggataaagaaattattcaggaatttagcaagaggctgggcacggtggcttatgcctgtagccccagcactttgggaggccgaggcgggcggatcacctgaggtcaggagttcaagaccagcctggccaacatagtgaaaccccatctctactaaaaacacaaaaatgagccgggtgtggtggtgggcacccttaatcccagctactcaggaggctaagtcaggagaatcactcgaacctaggaggtggaggttgcagtgagccgagattgttccattgcattccagcctggacaatggaacaagactccatctcaaaaaaaaaaaaaaaaagaatttagcaataaacatgaaaaaggaaaacaaatcttaacaggttaacatttctccaaacatattcagtgccagaagacacagaaggaatttatacaatattaaaaaggagtggctggagagtattacgtccagtaaagttcccatttgtgtataaagacatgcaaagagttttagacataaaattaaggagttcactaaggaattcactcatgaatccttctcagaggcagagatggaggaagcaacaatgaagtccagttaactaaggcaatgaaatgaattattcatcacatcagggacaggggtatgtgataagccaggtatagctttaaatatagaagaagcctaaacaaaaagatacttgtgattgccatcaatagtcgaggttatgagccttgactccataaagtatatataagccatgggttggaggagaatagcaaaggaaggccagaagcctgtgagtcataacgatgagtgaagacatgctatactatttaattgggaagatacgagtttaaccaagtaaatattgtataaaagttgtcttcaatattagaggaatttgaggaccaaactacttcttcattctaaagaagatctactgttcacctataagacacatagactgaaaataagagggagatattccatgccattggaagccaaagaagaggagtagctatgcttatatcagacaaaacagattccatgacaaaaactataatgagacacaaagaaggtcattatgtaatacaggggttgatctagcaagaggatgtgacaactgtaaatatatatgcatccaacactggagtcctcagtttagctctaataattgctttatgtaagagagactctaacacaattacagctgtagacttcaacatcccattttagtgtggtattcatgatcttggtaagttctcttaacccctcaggtattcaggttttcaattggaatacatgattttatctattttagagatgttcgggagggactaaatgagccaatgatgacgacctgcataggagtgtacccaaaatgttaaccctccatgacgcttacacagagtcccctacatttctgtagctgggtcttatggtaggagcgtacccggttgttaaccctccatgatctttacacagagcccctacttttctgtagctggatcttatggttctaggacagagctctctgctgggaaatctgctctagctcaagtactttctttgagtctaatcctttggctggctactttcatataagctggtttgcataataacagaaaataaaggtaggatcataaagccacaaaatagaacatgacccatatccaatctatccctggtcctcatgtgatgtccagttctgaagactggttctttggggatggaaaagtcatgtatcaaaaccaccaagctaaacaattccatcaacaagtggactaaggacacaaatagatgcttctcaaaagaagatacacaaatggccagtatctgatagtccttgaaaaaatgaatatgaaaaaaatgctcaacatcgctaatgaccagggaaatgcaaatcaaaaccacaatgcaatcccaccttactcctgcaagaatggccatgataaaaaaaaatttaaaaaatagatgttggtatggatgtggtaaaaagggaacacttttacactgctggtgggaatgtaaaccactatgaaaaccagtgtgactattccttaaagaactaaaagtagaacgaccatttgatccagcaatcccactactgtgtatctacccagaggaaaacaagtcattatacaaaaacacatgcacacacatttatagtggcacaattcgcaattgcaaaaatatggaaccagcccaaatgcccatcaatcaacaagtggataaagaaattatgaacacacacacacacacacacaaatactactcagtcataaagagaagcgaaataatagcatttgcagcaagctggatgggattagagaccattattctaagtgaagtaactcgggagtggaaaaccaaacattgtattttctcttaagtgggagctaagctatgaggatgcaaaggcataagaatgatacattggactacagggactcggcgggaagtgtgagagggaggtgagggataaacgactacacactgggtacagtgtgcactgctcagacggtggggatgccaaagttttagaaatcaccactaaagaacttactcatgtactcaaataccacctgcttcccagaaacctatttagaaaaaaaaaaaaaaaaaggcccaacacccagcttcctgtgaagtgccctgatttctgcccacccttctcgtgaccccactcacggtttcgtctgccaatgatcttcctacaaagatcttccttacgcatcattgaaaatatgctgaagagcatattccatatatactgtccctcataagagattggcaacacgttagccagttcttcttttgtcatctgtatcagtggaaactgtggcagtttgaaatcaagaatcttgcgtgccagatacttcttaaaactctgaaattccttgtcactgagattctctagataccacagcaggtcaaagtcagtagaatccgattctgccatcttgcttctccagggaaggcagacttcagagaagggattttgaggcacaagaaatatgagatctaaaaatagatgtggaatcagacaatcaaaccacacagtaatgccaattcatccaaagctaacatcctagacaattcctgtggtgtgatagaagctcctttctgataggccatcaacgataagtctgaactctttctgtctgggtcaatggccttgtcgactgatcttggcaaatttctaggttctgttaaggtggaacatcagttgtgttaaaaggcaacattcttatggtaaaagttatccctgattagcaaatagcatataggttgagaattgagtatcatacagaaactttggaggggagtgtttcttttgaaattgtcaaccctatgcagattggaaatctagacttgtggtctcttacaagatatgctgttgtatatgaaactcctctatgttagaataatctgtatagcaattggctgtatttacaatgattatactccttggaggtatgtcattgatacgtataaggactcctaatgaagaggcaactgttataataagcaaacaggctgtttgtggtcttgtatgctgctgaaaagaaatctaagttatgatgtactctgttctgtcttgttagtatataaatgagccaaagacagcccctaggttattttttcactctaggctgaaatctgttagcgcataaagcccactggcttcagactcaagttttttatacaaccaattgttttaaacacagcccaaataagcagatgtttagccatgtagagcctgcccgctttgcatacctcgcagaactgctcccaacatctgccagcaataggtaagtccccagggtcaagatgactgcaaggtgctactgccctttggagctctcggacccaggagatcttcctccccactgtactgagtggtatcgcctacacacacacacacacacacacacacacacacacacacacacacacacacacacacacacacaggttgcctcttcaattctaccccacctctgcaggggttccccatcttcctgtcctcctgagtagggacccacacactgtagcccctggccaggctcctgctgtaagagacatgccccacacacaaacctgtgaaaatgccacccaaaaaagcatgtgtgcaactgccaccccttggttatcttttcccttgaccaatttctaaaccccgtgagcctcccacacctgtcagtttcaatgtcagtctaatcctggtatcattacactccgtcacgagaagttgagattgccgagttgtgactaaagaatccattccagagccttgacccaacacagtcaaggctctcagagtttatgacaaaggtagagaaagaagatctgatcagatatgagtggatgtggattggctaacatctccatggttttacagcaaatgcttcgacacagagaacaagggataaatagtccctttgggggcgaaaaagaaagttggagaatggcaggtatctgcttgaggctagactgctcgatctctaaccatgaaataaacctaactagatactcaaccgtaactaggttgttgggcgtaaagaaaccgccagtgaagctgataagatgcaccaaatacaagacagagtcactggtattgtagacacactcaacagtgatgcctacctgaagggaagaagtaggcatattaagcttgcagacctcatataccaggtactatgttagaagatagagccactgggttggatctgactccatcgtggccatgaagtacatggaaagatactcatgatcccccaataaaggggtaaaaaaatgggcatactgacatgcacctatggtacctgagttttgcagcattgctatgccaatccccagtgcccaacaaggtaagaactatgacaccctcttccagaacattttcatttgccctaaaggaggacctgcaactagtaagcagtcactccctgtttccctctcctcccctaaaggagcctttaaatgcatggttgagctggcagaaaaaacaataaggaagtcactgagtttcagaaggcacgcatgcacccagggagtcgctttcatgttaggtcaggtgaagtcgagcaaactttggcagcctagagctcagttttaggaaatcatatacaattttagggcaaaggagaagacaaaccctggggcacattgaggtgggaggacagatgaaaggccaccagtcagtggcaggggatagacaaatgagaaggttaactagaaaatcccactgaacagagggtggtggaattcttactctgctcagtatcgggtctgaggaggaaaggggaagcaatcgcaccctttgagttcctaaacctaagctggacttcggagagtaatcatcccacagcttttcgtctcatgtatatttttgtattctggacctaaatgcacaaacatgctaagaaatctttcgaaaacttagtttttcaaaaatgtcttaatctctcttaactcagaaaaaaagtcattacctgaataaaatggaatgtgaagccataaagattggtttctaggtctatatttgctggacctacaaagatatttataatatactattgagataaaaagcagtgaatgggactggtaccctgacatatgtacatacaggtgtcgtgttggctgaagccaggatttcagggtgtacagaagagagttaacatgacacgtccgaaactgccatctttaggatctgcctgctacattggccgttggctagcatctggaacctggatgtggaaggcaccccccacccacattcccagagctgataagagtggctcacatgcctttatggcttgtacagacaacatggcttatgctgaagctttgctgtccttctgggagcctggaagcttgcaatttccttccatctaagcagtgagccaattttctcggcactgtttaatgcatattttggaatatgctagggagaggatgcctatgtgaccagctctctctctctctctcacacacacacacacacacacacacacacacacacacacacacaccccaagcactgagtttgtaatgatcttccacagcagccaatacctcgtgtgtgttttttatcacttgctgctgggggaattccacatgtcctgggtgactctgccgggagaggacactcgggagcctggtttcctctggattttgtcccatgtgcctctttgctttgccgattctgctttgtagccctcactgtaataagtcacagctgtgaacaggactgtgcccagtcccaagtcatcccacctaacccaactaggggatggcattcaacacctgacacacagggtaacaggaaatagcctcacaacattgaatgacgtcctcctaaactcaccatctcttaccttgcagcaggcaaacccattaacattgttagtgatgggagaacccattaacattgttagtgatgggagaacccattaacattgttagtgatgggagaacccattaacattgttagtgatgggagaacccattaacattgttagtgatgggagaacccattaacattgttagtgatgggagaacccattaacattgttagtgatgggagaactgctttcaggtctaattactcccttaaatggaagtctccatcagggcaggaccactgtttctctttctccccagtgttctcagcctctgtatccataattgacacttagcatatttgccaagaggtcagt[141 bp omitted]tgaaaccccatctctactaaaaatacaaaaaaattaggcaagcatggtggtggtggctacctgtaatcccagctatttggaaggctgagacaggagaatcacttgaacctgggaggcagagattgctgtgagctgagatagtgccactgcaccccagcctgggaaacagagcaagactctgtctcaaaaagaaataaaaaaagattgccttagtctcattggaatttctcttctctctcaccctaaaatgatatctttacgtcatgactgaagatgtcaaagaaaaattttagaactgaggcttagaattttatcagactgcagggaggagccaagatggccgaataggaacagctccggtctacagctcccagcgtgagcaacgcagaagacgggtgatttccgcatttccatctgaggtaccgggttcatctcactagggagtgccagacagtgggcgcaggtcagtggatgcgcgcaccgtgcgcgagccgaagcagggcgaggcattgcctcacctgggaagcgcgaggggtcagggagttccctttccgagtcaaagaaaggggtgacggacgcacctggaaaatcgggtcactcccacccgaatactgcgcttttctgactggcttaaaaaacggcgcaccatgagactatatcccacacctggctcggagggtcctatgcccacggagtctcgctgattgctagcacagcagtctgagatcaaactgcaaggcggcagctaggctgggggaggggcgcccgccattgcccaggcttgattaggtaaacaaagcagccaggaagctggaactggggggagcccaccacagctcaaggaggcctgcctgcctctataggctccacctctgggggcagggcacagacaaacaaaaagacagcagtaacctctgcagacttaaatgtccctgtctgacagctttgaagagagcagtggttctcccagcacgcagctggagatctgagaaccagcagactgcctcctcaagtgggtccctgacccctgacccccaagcagcctaactgggaggcaccccccagcaggagcacactgacacctcacacggcagggtattccaacagacctgcagctgagggtcctgtctgttagaaggaaaactaacaaacagaaaggacatccacaccgaaaacccatctgtacatcaccatcatcaaagaccaaaagtagataaaaccacaaagatggggaaaaaacagaacagaaaaactggaaactctaaaacgcagagtgtctctcctcctccaaaggaacgcagttcctccccagaaacggaacaaagctggatggagaatgactttgaggagctgagagaagaaggcttcagacgatcaaattactctgagctacgggaggacattcaaaccaaaggcaaagaagttgaaaactttgaaaaaaatttagaagaatgtataactagaataaccaatacagagaagtgcttaaaggagctgatggagctgaaaaccaaggctcgagaactacgtgaagaatgcagaagcctcaggagccgatacgatcaactggaagaaagggtatcagcaatggaagacgaaatgaatgaaatgaagcgagaagggaagtttagagaaaaacaaataaaaagaaatgagcaaagcctccaagaaatatgggactatgtgaaaagaccaaatctacgtctgattggtgtacctgaaagtgatggggagaatggaaccaagttggaaaacgctctgcaggatattatccaggagaacttccccaatctagcaaggcaggccaacgttcagattcaggaaatacagagaacaccacaaagatactcctcgagaagagcaactccaagacacataattgtcagattcaccaaagttgaaatgaaggaaaaaatgttaagggcagccagagagaaaggtcgggttaccctcaaagggaagcccatcagactaacagcagatctctcggcagaaaccctacaagccagaagagagtgggggccaatattcaacattcttaaagaaaagaattttcaacccagaatttcatatccacccaaactaagcttcataagtgaaggagaaataaaacactttacagacaagcaaatgctgagagattttgtcaccaccaggcctgccctaaaagagctcctgaaggaagcgctaaacatggaaaggaacaactggtaccagccgctgcaaaatcatgccaaaatgtaaagaccatcgagaccaggaagaaactgcatcaactaatgagcaaaatcaccagctaacatcataatgacaggatcaaattcacacataacaatattaactttaaatgtaaatggactaaattctccaattaaaagacacagactggcaaattggataaagagtcaagacccatcagtgtgctgtattcaggaaacccatctcatgtgcagagacacacataggctcaaaataaaaggatggaggaagatctaccaagcaaatggaaaacaaaaaaaggaaggggttgcaatcctagtctctgataaaacagactttaaaccaacaaagatcaagagacaaagaaggccattacataatggtaaagggatcaattcaacaagaagagctaactatcctaaatatatatgcacccaatacaggagcacccagattcataaagcaagtcctgagtgacctacaaagagacttacactcccacgcattaataatgggagacgttaacaccccactgtcaacattagacagatcaacgagacagaaagtcaacaaggatacccaggaattgaactcagctctgcaccaagcggacctaatagacatctacagaactctccaccccaaatcaacagaatatacatttttttcagcaccacaccacacctattccaaaattgaccacatagttggaagtaaagctctcctcagcaaatgtaaaagaacagaaattataacaaactatctctcagaccacagtgcaatcaaactagaactcaggattaagaatctcactcaaagccactcaactacatggaaactgaacaacctgctcctgaatgactactgggtacataacgaaatgaaggcagaaataaagatgttctttgaaaccaacgagaacaaagacacaacataccagaatctctgggacgcattcaaagcagtgtgtagagggaaatttatagcactaaatgcccacaagagaaagcaggaaagatccaaaattgacaccctaacatcacaattaaaagaactagaaaagcaagagcaaacacattcaaaagctagcagaaggcaagaaataactaaaatcagagcagaactgaaggaaatagagacacaaaaaacccttcaaaaaatcaatgaatccaggagctggttttttgaaaggatcaacaaaattgatagactgctagcaagactaataaagaaaaaaagagagaagaatcaaatagacacaataaaaaatgataaaggggatatcaccaccgatcccacagaaatacaaactaccatcagagaatactacaaacacctctacgcaaataaactagaaaatctagaagaaatggataaattcctcgacacatacactctcccaagactaaaccaggaagaagttgaatctctgaatagaccaataacaggagctgaaattgtggcaataatcaatagtttaccaaccaaaaagagtccaggaccagatggattcacagccgaattctaccagaggtacaaggaagaactggtaccattccttctgaaactattccaatcaatagaaaaagagggaatcctccctaactcattttatgaggccagcatcattctgataccaaagccgggcagagacacaaccaaaaaagagaattttagaccaatatccttgatcaacattgatgcaaaaatcctcaataaaatactggcaaaccgaatccagcagcacatcaaaaagcttatccaccatgatcaagtgggcttcatccctgggatgcaaggctggttcaatatacgcaaatcaataaatgtaatccagcatataaacagagccaaagacaaaaaccacatgattatctcaatagatgcagaaaaagcctttgacaaaattcaacaacccttcatgctaaaaactctcaataaattaggtattgatgggacgtatttcaaaataataagagctatctatgacaaacccacagccaatatcatactgaatgggcaaaaactggaagcattccctttgaaaactggcaaaagacagggatgccctctctcaccactcctattcaacatagtgttggaagttctggccagggcaattaggcaagagaaggaaataaagggtatccaattaggaaaagaggaagtcaaattgtccctgtttgcagacgacatgattgtatatctagaaaaccccattgtctcagcccaaaagctccttaagctgataagcaacttcagcaaagtctcaggatacaaaatcaatgtacaaaaatcacaagcattcttatacaccaacaacagacaaacagagagccaaatcatgagtgaactcccattcacaattgcttcaaagagaataaaatacctaggaatccaacttacaagggatgtgaaggacctcttcaaggagaactacaaaccactgctcaaggaaataaaagaggatacaaacaaatggaagaacatttcatgctcatgggtaggaagaatcaatatcgtgaaaatggccatactgcccaaggtaatttacagattcaatgccatccccatcaagctaccaatgactttcttcacagaattggaaaaaactactttaaagttcatatggaaccaaaaaagagcccgcattgccaagtcaatcctaagccaaaagaacaaagctggaggcatcacactacctgatttcaaactatactacaaggctacagtaaccaaaacagcatggtactggtaccaaaacagagatatagatcaatggaacagaacagagccctcagaaataatgccgcatacctacaactatctggtatttgacaaacctgagaaaaacaagcaatggggaaaggattccctatttaataaatggtgctgggaaaactggctagccatatgtaggaagctgaaactggatcccttccttacaccttatacaaaaatcaattcaagatggattaaagatttaaacgttagacctaaaaccataaaaaccctagaagaaaacctaggcatgaccattcaggacataggcatggccaaggacttcatgtctaaaacaccaaaagcaatggcaacaaaagccaaaattgacaaatgggatctaattaaactaaagagcttctgcacagcaaaagaaactaccatcagagtcaacaggcaacctacaaaatgggagaaaattttcgcaacctactcatctgacaaagggctaatatccagaatctacaatgaactcaaacaaatttacaagaaaaaaacaaacaaccccatcaaaaagtgggcaaaggatataaacagacacttctcaaaagaagacatttatgcagccaaaaaaaacatgaaaaaatgctcatcatcactggccatcagagaaatgcaaatcaaaaccacaatgagataccatctcacaccagttagaatggtgatcattaaaaagtcaggaaacaacaggtgctggagaggatgtggagaaataggaacacttttacactgttggtgggactgtaaagtagttcatccattgtggaagtcagtgtggcgattcctcagggatctagaactagaaataccatttgacccagccatcccattactgggtatatacccaaatgactataaatcatgctgctataaagacacatgcacaagtatgtttactgcggcattattcacaatagcaaagacttggaaccaacccaaatgtccaacaatgatagactggattaagaaaatgtggcacatatacaccatggaatactatgcagccataaaaaatgatgagttcatgtcctttgtagggacatggatgaaattggaaatcatcattctcagtaaactatcacaagaacaaaaaaccaaacactgcatgttctcactcataggtgggaattgaacaatgagatcacatggacacaggaaagggaatatcacactctggggactgtggtggggtggggggaagggggagggagagcattgggagatatacctaatgctagatgacaagttagtgggtgcagcgcaccagcatggcacatgtatacatatgtaactaacctgcacaatgtgcacatgtaccctaaaacttaaagtataataataaaaaaaagaattttatcagactgcaaagttagtaatgatgtcaattaaagtagatctgtacttctcatggagaatactcattgcaacaaattttaaatcccaggagagctgctatgtgtgcacatgtgtaaggccactgcagccccaattaagtatatcataattatggtatcacaaatccacactgatacgaaatatgcattaaatggtgctgagaaatttggctcatcacctagatggaaggaaaatgcaagctttccatcactatacaaacaaaattcagtaaataagattgggttgtattttttaaggaatgattgggacttaatatttaattaagaaatatttaatcatgcccttgtttctgattttatacttatagaataaggaatgttccataagctttacgtgtcgtgactctggggcttaataaaaacagatgtatatctgacctttgaagaaaaatatgtagacaggagagatgaagataacatagagaagattttaaagttattaagaattctattcacaatcattgaggaaatatcaattagatatagaacttgaagagacaagaagttacaaatggctaacacacgtatatacaaaattagcaccttgtagttcagtcaacagcaacttccagcaatcaatttaagaagcattgcactgtggtcagatgagggtatgaaatgttggtgtaaaacagtgttttgccttttgagaaaagtaagtaataagagcttttaatatacatacacacgctgacacaatattgcattttttttttttttgaggaacctatgaagcagagtcactaggcataaagcttatggaatactctttaaatcatcctatacaatagtataaaatcagaaacacctgaagtctgacaaggacatgattagatatttccggtgcattattatgta[132 bp omitted]gtgaagccttgtctctactaaaagtacaaaaaattagccgggcgtggtggcacgcgcctgtagtcccagctactcagaaggctgaggcaggagaatcgcttgaacctcagaagtggaggttgcagtgagccgagatggcgccactgcactccagcctgggcgagactccgtctcaaaaaaaaaaaaaaaaaaaaaaaaaaatcgtactttaaagaacacaagaaaaagctcataaaacagcgtttacagaagtatgaactgtttgagtctaaaggtaactccactttcttaaacatattagagggaaatacagttgactcctgaactcaaaagtcaatgctgccagcccctaggcagtcaaaaacccacgtataacttttgacttccaacactcatagcctactattgaccagaagccttatcaacagtcaattaacacataagtagactcacatctatattgattgcattcatgacatatctgactttaattttttaagtatttctaggctgcctggttcatctacaagttgtcatacatctcccccaaaattctccaatatatttatttttgaaacttcatgtataagtggacacatgcagctcaaacctgtattgttcaagggtccactgtaaatctgtttaacacaagtgttttcttcttttaaatcttgtatctaggtgtttttcccccctaagtgaacacaagtagattagggattagtaagttaagcctcaccaagtccaacccttccccaaattcccaaactcttccctcctttgacttctatttcaccattgcctttgagccccatccttgtaactgagagacttccgagttcaggagtcaactgtatttctttctagtgatatgtttgtctaataaagtagttacctttagactcaaacagtccatatttccctaaacactgttgtatgagctttgcttgtgttctttaaggtatgatttttaagtggtttggtaataatgcaccagaaatatttaatcatgaccctctcagtctttaggtgtttctgatttcatactgtgacataggatcattcaaggaaaattccataagctttttgcctagtgatggcttcttagcttcctaaaaaaaaaaaaaaaaatgcaacgttgagtgtgtgttaaaagctcttattacttttcccaaagggcaaaatactttttttacaccaaccttttgtacactcatctgaccacactgcaatgctttttaagttggttgctggaatttgctgttgactgaactataaggtgccaactgaactatgaggtgatctccaacacctgcaaaaaagctgacactacagcattgcacgtcccaagtcggcgttgcatcagattagctgatcaccgcacagttgggcacttcaagcacctgtgaccagactttctcaagcactgagacacaggggaatcacctggggagttatcaaaaaccccagtgtcccgaaatacagacactgattagagactttggaggttgggcccaggaaccagtatattgttccaatcccccctgtaaattcagcactcaaagttaagaatcaatttgtaaactaaaaataacatgttaagacccaccgccccaccccccccatcccccccacccccccgcccacaaccaactgagcggaccccctcctggccaagatacttgaaaaacagaatcattgactatggcaggaagggaggtcaaacctcctcctatctccttcctttcggagcctaggc[132 bp omitted]acatggcgaaaccccatctctactaaaaatacaaaaattagctacgtatgctggcgtgtgcctgtcattcctgctacttgggagtctgaggtgggagagtcacttgaacccaggagacagaggttgcagtgcgctgagatcacaccactgcacgccagccttggcgacagagcgagactccgtctcaaaataaataaataaataaaaatattcttttcatctctaacactttatacatcacatagaagaatagcatccataaggctatgatgacgagttagttaggtttaaacactccacccacagtgcacatacacttcaaaacatcatgctgcacacactacatgcaattttatctgtcaacttaaataagtttatcaaaaaaaaaaaaagcatgacccaaatttactcatgtgaacttgaaaaaggtaacagagcttggcctgcccttaggaactttagtcattttattccccaatcatattatttccagctcctaaccaaagagaaagctaaagaaccaatgtaacataataaaaaaagaccttaaaatccaaacaaacaaatcggccagaaaggtaactcaccaaccctgccaccaggtctccttggctggtcgaaagcaaacaagctaggcagcgggaagaaaaaggcggtgcctgcccggtgattagccagctgactcctctcttgattggccaaggtgggttcttgatgaccttcgcgatggaggggaaatactgctgcacctgcgtgtttctgcccagatgccccaattgtctttcttcacccaggactaaacagggtctgctgattaggagacggtccacaccccgtttatgatgttggagctcatggggcatctgaccaagaacctccaaaacaattgacttaggcagtgccgggggaaagaagttttccaccaataatctcaatttcggataaccatctatacagtaagctccatgaggggaatacgctgtctagtctacataaccacctggcaaggatcctttcaaatctgagggaggccataaatatttgtggaacaaatgcaaccaaaggcatgtttaacaggtgatagaatttgcggaggcacgtcctagatcctccacccggggggcccgtcttggctgcctattggaatcacctggagacctctagtgaagactgatagctcagtcctatgcgcaggtatctgctttagtcaggagggagtatgctctgggtatgactgatagagctcctcatattgaacagattacagaagaataggggcatcttcataggtgcaaaaggggaaatataaaagagtctatatctattcatggttttagatgtatctttgtaagttaggaaataaaagaatttccttcacccagtaaagggttccaaaaaagcaagagcaaacaaaaatctcataatggacgggaaagtgatgaaagaataccttttacaataagatacaagataaacaaggcctccgtcaccactcttatttcaacatagtgcacctgttcactgggacaagaaaacggatctgaaagaaagaggcgaaattatcatattggagataatttgaatatccatgcaaactctctccccttaaatctattgataaattgttaggattcaaagcagctttggtgaatataaatcaacatacaaatctgattgtgtttctctaaaaaaaaactaattggaatttaaaattttaaaggatgccacatgcagttccaagaaaaatataaactagaaataattcttataagagattgtaaatcttattgaatgatatacaatgttattgccatatacaaaatccttaaaaatgaaggataacattacattcttgtacaggaattattattatgaagatgttaatatgctcccaaatagacctttatattcagtaaaacaataaaatcccaatagaaattttcatatcaaaatataattctgaaatgtatgtggaaaatagaagggactagtacaagccaagagacgcctgaagcacataggtgggtgggaggtgggaatgatgattgagttggacctaccctataaagatttaatttaaaaactatggtaattaagacttattggttggccgggggcggtggctcatgcctgtaatcccagcactttgggaggctgaagcgggcagatcagaaggtcagaagatcgagaccatcctggctaacacggtgaaacccccgtctctaccaaaaatataaaaaaatttagccaggtgtggtggcgggcgcctgtagtcccagctactcgggaggctgaggcaggagaattacttgagcccgggaggaggagcttgcagtgagccgagatcaggccaccgcactccagcctgggcgacagagcgactccgtctcaaaaaaaaaaaaaaaaaaaaaaaaaagacttattggcacacggatgaacaaataatagtgaaaaaaacatagaacccagaaaccaatgtaggcaaatacgaaaagctggtttataacagatttctgggcagtggcgtaggtgaactattcattaaatggagctggtgccatttgtatttaaatgaaaaaaaaaaaatggatcccttctccctaccttagagaaaaataattacaagtgacttaatacttctgtgtgaaattcaaaactctatcatattttaaaaggcaatattagatatcttcatgagttggagtagggaatgatttttgtcaacaagacctcacatttataaaacataaagtacattttgatcaatttgatttcatttaaaataaaaactcttcagtgaatggttcttatataacaaaagctacaaaccacaaactaggaggagatatatgaaaatacgtgcatcacacataactgaccaaaccactttttcagaaaaggtaaagcacttcttcatgcaaataaaaacagaacacaaccaatagaaatacaaggaaaacaatgaaaaggtatttcacaaaagaggcaacaaatggctcacaaacatgagaacaatgttcaagtatattaataatcagataaaagcaaatgaaaacaacaaaatactttttccaactaatatttggtgactactttaaaatgtcaacaacatcaggagtaggcagtaaggtgcagctatggggatattcaactgtgcatgatgctaatgtaattagtgaaaccacttctgaagaggcaactgaagtcacctgtgcctcagggactcagtcattccactcaggtaatccaaaagtcctgtgggctcactgatgtgtgcaagaaggttcaaaacagcattgttcatattggcaaaaactgagaaaccacccaaccacctatcactgacagaatggatcattaaatggtgacctagtcatacatttaaataccgtgaggcaagacctagaaatgaaccgcagctataacaaactcgcattgattaatctcaaaaacataataagtgaaaagaatcaagtcacagaatgatacactataattcgaaaatgaggaaaacaaaacatatctcttaggggaacatgtatcaccaggaaaaataaaaagaaaatcgaagggaatgaagttcacttcacaactggaaatttattttggtgggaacccctgaggatgcaacgggcatgctcttatgggtacatgagtctgcaaaggtccccatcatgtctgcttcccaatctaggttctggaccacagagacttgtgttatggttacagtaattccttaaagttctcattatgtttctctgcactccttgatgtgtatatttcaaaaccaggatcatcaccatcgtaacactgaactcaggattcttataaggaggaactaaaatggtgattgtaaaaggatagctcctaggacactgaggtttggcgtgaacccagaagatgactgtaacgattgtagggaagctggaatagcaggaaaaccatgcccaatgatgaaatctcgaccttgcgtctaaaaaacttagcgcctgttctgcctacgcagaaagaca[136 bp omitted]accctgtctctactgaaaatacaaaaattagccgaggccaggcacagtggctcatgcctgtaatcccggcactttgggaggccgaggcgggcagatcacttgaggtcaagggttcgagaccagcctggccaacatggtgaaaccctgtctctactgaaaatacaaaaattagccgaggccaggcacagtggctcatgcctgtaattccggcactttgggaggccgaggcggtcagaacacttgaggtcaagggttcgagaccagcctggccaacatggtgaaaccctgtctctactgaaaatacaaaaattagccgaggccaggcacagtggctcatgcctgtaatcccagcacttcgggaggccgaggcgggcagatcacttgaggtcaagggttcgagaccagcctggccaacatggcgaaagcccgtctctactgaaaatacaaaaattagccgggcatggtggtgtgcatctgtaatcccagctactcagcaggctgaggcaggagaatctcttgaacccgggaggtggaggttacagtgggccgagatgacgccactgcactccagcctgggtgaccgagtgagaccgtatctaataataattaataatttcttcttgcacgacaggtttagttacggcagaaagatgttgtgccacacgaacattcttcaaggagtttagcatgtaggaaggaattagacatttaaattataaacagagtcaccccaactctccaaatgaaccattttggagagactggaggagcatccctgcagccgtgagccctgggaattctcaataggaacctccagcttgaaatatcccccgctctatacgacaccaggagcaaaggtctagaacagcccctcaaggggcggtgggcgtttcgcttcacatattttctggatctgttcatcaaaagccctctgagccaatggcaagggagcaattcgttggccaatcaaatggcaccacggatcttttcttcccgcttccagccgccaatcattaaggaccaggaaggcgtggagcggtgagtcagcgcttcgtgctgggctgttcgtctcttctatgtgctgatttcctgggttactttgggtcttccttttctttctcccttttaccctgtctcctttcttgaggctgatcgatcacagccaggcctctccattctatttacccagcgttttccttctctccagttagtggggtagatgaacgccctgtgtttataaggtgcctcccaggagcctgagacctgtgagaagaatggggggtggaggtgggggagactcgtcacgaagggagaccttggagcttcgagggtgggaatgttcttattagattcttcatctctgttgacacaaacatgtaggagaagctggagaacatagacagggatgaggtaaggggggggacttcccatgaaaggtgggacccaagccctctctgctcttgtgagcttgctctctgacctagggcagaaacgtctttgatactgtaattccagaatgtgatttaaaaagaaaatcacacttctagttgactcatactaattatgtatattagctgcagagagatgtgttggtacatgtatacgtatcattaaatcagggtaatgagcatatccatctcctcatacctgtatcatttctttgtgttaggaacattcagaatcctctccttaggtgggaggagggagagggtcaggaaaagatagctatggggtcctattcttaatacctgggagatgaaaaactgtacaccaaacccctgtgacacgagtttacctgtataaccagtgtatatgtacccctgaacctaacataaaagttagaaaaaccctcgaaaataataagatattaagtatattcaacctatagtgctactgaacaccagcacctattcctacctacaggtgtaacttggtatccattagccaacctcttttcatcccccttctccaattatgccatttgtttagactatgaaacgtatatagaaagaatatttatctttctatatcaataaaagttggtttttactgttaagggttgaattgtgtcccaaccctaaaaacacacacacacacacaaagtcctaacccctttatagggtgacaaaataaggttgttgcagatgtaattagttaaggcgaggtcatactggagtgagtggcccccctaacttaatgacgggtgtccttatgaaaacggccacatgcggctgggtgtggtggctcatgcctgtaacaccagcactttgggaggttgaggtgggtggatcatctgagctcaggagtttaagacaagcctggaaaacatggcaaaaccctgtctctactaaaaatacaaaaatcagctgggtatggtggcaggtgcctgtaatcccagctactcaggaggctgaggcaggagaattgcctgaacccaggaggtggagattgcagtgtgccgagattgcaccattgcactccagcctg[139 bp omitted]aattagccaactgtggtggcgcatgcctgtaatcccagctactcaggaggctgaggcaggaggattgcttgaacctgggaggcagaggttgcagtgagccaagattgcgccattgcattccagcctgggcaacaagagtgaaactccatcttagaaaaaatggccacatgaaggtagagacaagcagaatggcatgtgacaaagtcagagtgaaattacatagctgcaaaccaaagagtgacacaggttgccagcaaaccacagaagccagtaagaggcaaggaagggctcccctgggtttcagagagagcagcaccctgccaacactttgattttggacatctaggctccagaaccatgagacagtaggtttctgttttaagttacctagtttgtggtacgttgtcatgccagcccaaggaagctagtacgctattaaaagaaaaaaatgatgtgattttacacttagagaacagcttcaagaatatatccttaggatcaccaaatgttaaaagtttaccttatatggtgtccctctactcttatataagtatttttcctgatctgttcaagatttgtacacattgtacaaatttacatctaataatttaccctaaatgcttcagggtttatcttctaaaaataaaaataaaagtaagctcttttgataaccacactatataaaaaacaggaaattaatagaatgatattatctaatgtacagatcttacacttaatggactttttaatttttgcatttgttttcacaagtagaccgaacatggaaattcttacactaagcctgttttttttttttctttttttaaatttaagttttgggatacatgtgctgaatgtgcaggtttgttacataggtgtacacgtggcatggtggtttgctgcacctgtcaactggtcatctaggttttaagccccacatgcattaggtatttgtcctaatgctctccctcccctttcccacccctcacccacgggcctcagtgtgtgaatgttcccctccctgtgtccgtttgtgttcttattgttcaactcacacttctgtgtgagaacatgcagtgtttggttttctgttccagtgttaatttgctgaggatgatgtaaacctgttttcattatctaacctatgcctcagtttgagtgtgtgtgtgtgctctttcacacacatatacacacatgcttatgctctcacacacacatacccacacacatgctctctcttagattctggaaaaataatttttatttaaattttgacataatttgctgatgaagatgtttgagcctgaagtcttctgtgggggaagagttaaaaaaaaaaaaaaaagctttcaaaacttcacacacacaaaatagatgaaagttgtcattttctaagaatttatatatttgaacaaaattatcagttttattggcataaaaatggtaatagtctcaatttttgatatctgtagggtatgtagtggtgtcttctgtttctggtattaattgctcatgtcttcttattcatcagacttgttgggggttatccagtttgtattttcaaagaatctacttttgacagagtcttgtattttaatttttatttcattgattattttttctactttcttttggtgtgttttgctttttatctaaatgtataattagtttatgaattttcaaccttccttatgcctttgaagtagcacatttttccagctcctgatttagctgtatttcactcacttcatatgcaacattaaatattcagttcaaaatcttatatccgatattttctctttattcatagattacttagaagtatgtttcttaattttggaatgtccttcatttcattgtcaaattctgacttaaattatgatcagaatattctgtgtaacttatattatttgaaatatgttgaagcttgccctgaggatcagtatatagctgacattggtagctgattcgtctatcttatagtgttttttccatttattgaatgaaaaggtctgtgtccacaaggtaaaatttttccattgtttttaagccctttattttctttttaacttgtttgtttaattgctggaacaaattgataaaatatcctgctatgattagggacttacctaattctccttatggtgctgaccattgtcgggggtgtgtgtgtatagacatatgtgtatgtgtatgtgtgtgtgtgtgtgtgtgtgtgtgtgtgtgtatacatattttcttttttctttttgagacagagtcttgctctgttgcccaggctggaatgcagtggtgccatctcagctcactgcaagctttgcctcccgggttcaagcaattctcctgcctcagcctcccgagtagctgggattacaggtgcctgccaccacgcccagctaatttattattttttattttttggtatttttagtagagacggggttttaccatgttagccaggctggtctagatctcctgacctcgtgatccgcccacctcggcctcccaaagtgctgggattataggcgtgagccacagcacccggctgatcattcgtatattttaaggctgtgttattgttgcatgtatgattataattgttctctcttcctggtaatttgagccctgtggttatgcagcatctagatttctcaccaatgttttggcttggggtctgcttttctggtatcaatattatgacaacagatttttttaaaagcctggaataattcaatatcttttccttctaattcaagtcgtgcaataaatggaatggatgaagagtttggtgagtaagatgggttatcataccttacgtatgcatgacatgctattttgttcagatttcccatttaaaaatttcttaaattgacatataattgtacatatttatgggatacagtgtgatgtttggacacatatatccattgtataatgatccaatcagggtaattatcatatctgtttgtttagacacatttctttgtagtgatactcaaaatcttctagctattttgaaatatccgccacactgttatttgctttagttaccctaatttgtaagagaacactagaacttgcgctttctaactgtaagcgtgcctgttgaccaatcgctcctggtctcccgttactctcccatcccttccccagcctctagtaaccactgttctactctctacttctataagttcatctttttagattccccatataaatgagatcatatggtagttttctttctgtgcctgccttattttacctcgtgtcctccacgttcatccaggttgccacaaatggcaagatttcattattttttatggctaaataatattccattgagtatatataccacattttctttatgcattcatttattgataggcacttagtttgtttc[133 bp omitted]aaccccatctctattaaaaatacaaaaaaaagttagccgggcatggtggcaggcacctgtagtaccagatacttgggaagctgaggcaggagaatggtgtgaacctgggaggcagaggttgcagtgagccgagatcgtaccactgcactccagcctgggtgatagtgcgagactctgtctcaagaaaaaaaaggtgctgcaatagacatggaagtaaggatatctctttgacatacgaatttccttttttaaagaggtatatacccagcagtagaattactgggttatatggtaggttctattcttaattgttttagaaacctccatactgttttccatagtggttctgctaacttacattcctaccaatggtgtgtaagagttgccttttctctgcatccttgccaacatttgttattttctttagccattctaacggggtgagttaccccagattttttaggttcaaatttgcatgtttagtctttcaactttcgtttttccgttcttagttacctctttaaagagcaagtatttggtttttgtatttagtctcaccatctttgcctctgtaccattgaggcaattattctgtgtaattactaataagagttcgagttgaccatcacttttttatttaccttatctgttctaggttcctatttctgtccttctttattttttaggttagtttgtcatttttcctcttctctatttactttggcagacaaacttttttatggttatatcagaattctatcagtgggcttatcagaatttcttatcaaatttttacttctgtcatcttcccagagaagaacattagagcacttgatgtcctttttcttttttttttagatttacgtgccagctgtgataaattttaattctattttctgtctcacaagactgactctataaagcaacttgtcttctaattgactgtggcatctcttaattttcacctgcaataattttccttctctccaatggtcaattttcaaaatttcctatagtgtaagtcttctgttggaaaatttgtcatttatctgcaaatgtctacttttatttctttttattttatttttatttttga[155 bp omitted]gtatttagtagagatggggttt[134 bp omitted]acttgagtcagcagctatttgttttgagcaccttgcatggttgcttctttagtttcttctttctgtagcacctgatcaggtcagctgtcaacataatggcacaaccgttcaaataaattattgtcctccccttgccttacccccactctggaatgctttcaagattttcccttttgtgtaacttctttatgttctaatgtcattatgtttccctataatgtgtctagacatgggtttgttatttatactcttggactttattgggcttcttaattagtagattgatttttttttcattggttaatagaaacatccaggccaggcacagtggctcacacacctgtaatcctagcagtttgggaggcagaggcgggtggatctcctgaggtcaggagttcgagaccagcctggccaacatggtgaaaccctgtctctactaaaaatacaaaaaattagccaggcgtggtgatgggcacctgtgatcccagctgctcaggaggctgaggcaggagaatcacttgaacctgggaggtggagtttgcagtgagctaagattgtgccactgcactccagcctgggcaacaagagtgaaactgtctcaattaaaaaaattataaaaagaaacatcctagtagcaatcttatattaggttggtacaaaagtaattgcggtttttgcatttttttcatggcaaaaaccacaattacttttgcaccaacctaataaaacatactacatctggtccacagtctcttttctccttttggggagccagtaacaagtgttagcccttttcatccttagtctcttgtcctctcttctgtgcttttcatctttttatctctctcttcttggatgacttctctttacgtgtcttctagaccactaattatctctgtcaaatctgatactaacacattgtattagcttcctggggctgctgtaacaacataccacaaaacagacagcttaagcaacagaaacttactgtctcacagttctgaaggctaataagtccaaaatcaaggtgctggcaggcgtaatttcttctgaagactgtgagggagaatcagtttattcctctctattaacttctacttgctttaggtgtgctttggttagtaagtggcattttccctgtggcatggtatcctcttccctctattcatatgtgtccagattttcccctttcttttttctttttatttttcgagatggagtctcactttattgcccaggctggagtgcagtggcatgatctcagctcactgtaacctcccgggttcaagcaattctcctgcctcagcctcctgagtagctgggaagacaggcacataccaccacttggctaagttttgtatttttggtagagatgggattttaccatgttggccaggctggtcttgatctcctgacctcaggtgatccgcccaccttggcctcccaaagtgctgggattacaggtgtgagctactgtgcccggccagattttcctctttcaataaggtcaccaattatattggatcgggggcccaccctgctttagtatgacctcatcttacatgttccagtacagctaattgcatctgcaaggatgctatttccaaacaagcccagacttcagttgcactttgtgacctccagtgtaactcattgtatctacgagtatgctattttcaaaaacttcatacttcagcatgtaacttttgcagggggacatacattggatgcagaaaagagtccctggtgatttttgtggtggtagtggtggtagaggagtgtgtgtgcgtgtgtgtatgcatgtgtgtgtgtgtttgggggaatatttaaagttccatctgtagccaatctgaatgcagtctttcccctcactttcagaggatctcttcccagagccggaggtattaatatttcagcctgtggcaagaggctacacttttttttaattattatactttaagttttagggtacatgtgcacaacgtgcaggtttgttacatatgtatacatgtgccatgttggtgtgctgcacccattaactcgtcatttagcattaggtacatctcctaatgctatccctcccccctccccccaccccataacagtccccagtgtgtgatgttccccttcctgtgtccatgtgttctcattgttcaattcccacctatgagtgagaacatgcagtgtttggttttttgtccttgcaatagtttgctgagaatgatggtttccagcttcatccatgtccccacaaaggacatgaactcatcattttttatggccgcatagtattccatggtgtatatgtgccacattttcttaatccagtctatcattgttggacatttgggttggttccaagtctttgctattgtgaatagtgctgcaataaacatacgtgtgcatgtgtctttatagcagcatgatttataatcctttgggtatatacctaataatgggatggctgggtcaaatggtatttctagttctagatccctgaggaatcaccacaccgacttccacaatggttgaactagtttacagtcccaccaacagtgtaaaagtgttcctatttctccacatcctctccagcacctgttgtttcctgactttttaatgatcaccattctaactggtgtgagatggtatctcattgtggttttgatttgcatttctctgatggccagtgatgatgagcattttttcatgtgttttttggctgcataaatgtcttcttttgagaagtgtctgtttatatcctttgcccactttttgatggggttgtttttttcttgtaaatttgtttgagttcattgtagattctggatattagccctttgtcagatgagtaggttgcgaaaattttctcccattctgtaggttgcctgatcactctgatggtggtttcttttgctgtgcagaagctctttagtttaattagatcccatttgtcaattttgtcttttgttgccattgcttggtgttttagacatgaagtccttggccatgcctatgtcctgaatggtaatgcctaggttttcttctagggtttttctggttttaggtctaacatgtaagtctctaatccatcttgaattaatttttgtataaggtataaggaagggatccagtttcagctttctacttacggctagccagttttcccagcaccatttattaaatagggaatcctttccccattgcttgtttttgtcaggtctgtcaaagatcagatagttgtagatatgcggcattatttccgagggctctgttctgttccattagtctatatctctgttttggtacactctgatcttgacactgtctccacatcaagaaaagtccaactctagttgcctgcttctccaagatggtctcagagcaaagcaccagcaatgttcttgcccaaagtcattctttaagtcagtggttttcaaatctgggcatgcgtcaaaattaactgacattatatataactgatgttatataacagatatataactgatattatatatctaatatcatcactaactatttgcccaaaattaacagatggctgtgccctaccctcagcatttagtgtgtctagggaaggacctggggatttgcatagcaagttaccagttggtgctgatgttccttggagaagtattgccttaggtgctcagtggtggcctcaggactcagatacatgttcctataattaagattttactaaaagtaggctttttaagactattggcaaaagcacgcaggggagaagccatgaaggtcacctttccatcatcatattctcattccgaatactgcttaataattttccctaatttttgtgggttttatttatttattttgagacagtcttgttctgtcacccaggctggagtgcagtggcacaatcttggctcactgtaacccccacctcccaggttcaagagattctcatgcctcagcctcctgagtagctggggctataggcgcctggctactttcccctaatttttggatcttagatgctattaaattttttttaaatttttctccaaattacctattttatttgaggggggggcagcaacattctgcctaatggccacccatgaataaaacagctttatttttattttccactgtataacttaacccttttattgactttgctattgatctctaatttcattgcccttaagacaaagaagatgactttgctactgttggctttttgtttttgaattatgatttcctttaaagctcagagcataattgattatcatgagcataattacaagctaattgattatcatgaatgttccacgtatgcttgaaaagaatgttctcttgtgtgtaggattccataaatattcataaaatgtgttgatttttatatatctaatatgaataactatttgccctatgtttttagtatcttttaaaattttagacttgttttagacacagaaaagtttgcaaaaatagtgcagagagttcccataaatcctgtgccacatttctctagtaacgactttcgttaccatggtacatttgtcataactaataaaccagtattaatagattattaactaagattattctttcttcagattcccccctttttacctaatatccttttttttttttttttgagatggagtctcgctctgttgcccaggctggagtgcaatggtgcgatctcagctcactgcaacctctgcctcccgggttcaagtgactctcctgcctcagcctcctgagtagctgagactacagacacctgccaccacgcccggctaattttttaatatttttagtagagatggggtttcaccatcttggtcaggctggtctcaaactcctgacctcgtgatctgcctgccttagcctcccaaagtgctgggatgacaggcgtgagccactgcacctggcccctaatatcctttttatgtgcctggacctcatctaggatcccccactgggtttcattgctgtgtctccattgagttctctaaactaggaccactctcaggatttccttgttttcagtgatcttgaacgttttgagaagcactggtcaggtatttgtgggacatcattcatgttgggtttgtgtgacgtttatctcattgcgagactggggctttgaggaggaagaccacgaaggaaaggtgcccttcccatcatatcatatgctaccacttgctacccatgttggccttgatctcctagcttaggtgtctggctggtttctccactctgaagttaatccctacccctttttatactatagtattgtatactatactatacgatactatagcatactatactatacattgagatggagtctcgctctgtcgccaggctagagtgcagtggcacgatctcggctcactgcaacctccacctcctgggttcaagtgattcccctgcctcagcctccagagtagctgggattacaggtacccaccaccacatccggctaattttttgtattttagtagagatggggtttcaccatgttggccaagatggtctggatctcctgaccttgagatccacccacctcggcttcccaaagtgctaggattacaggcgtgagccaccatgcccggctgtactatattctttaaaaagaagtctctatgtacaacccacatgatacggtttggctgtgtccccacccaaatctcatcttgaattgtggctcccataattcccacatgtggtgggagggacccggtgggagatacttgaatcatggggatggtttcccccatactgttctcctagtagtgaataagtctcgtgagacctgatggttctataaggggaaacccctgtcgtttggtcctctcttgtctgccgccatgtaagatgtgccttttgccttcccccatgattgtgaggcctccccagccacatggaactgtgggtccattaaaccacttttttctttataaattacccagtcttgggtaatgtctctatcagcagcatgagaacagactaatacaccacacttaagaggtggggagttatgccgcatctccttaaaggggaagaatccatccatctaagctacttggaattcttcttcttgctaaagttgttacagttttagctattggaggctctttcagcctgccctgggtttctttggttaggaagtggtcttagaaaccaagagctgatctggacactgggtgtatcgattgccactagggtatctgttatgcttccaggcccttgcatgagtgtgactgtaacagtaccgtagactaagactatacttccagggatcatttctatagttcactgcaaaatgctgcagactggatggcttaccaacagaaatgtacttcctctagttctggaggctggaagttcaaatcaaggtccagcagagtcccttcctgatgaagactttctggattgtacacagctgccttctgtgtccccacataatagagtcagaggaagagatggggagaaagagagccagggagggacttccagttgttccagcaccatttatggaagagacgatctgcctccattgtgcctttgtcaaaatgagttggctacatttgtggggcatgccttctctattgtttactgagaaaaatgtaatttctatatttacagtgtaatttctatatttaaaagtaaaaatgtaatttctgtagctgcggtgtaatttccaaagctgcggtgtaatttccaaagctgcggtgtaatttccgaagctgcggtgtaatttccgagactgcggtgtaatttccgtggccgcggtgtaatttccgtggccggcggtgtaatttccgtagccgcggtgtaatttccgtagccgcggtgtaatttccgagactgcggtgtaatttccgtagctgcggtgtaatttccgagactgcggtgtgatttccgagactgcggtgtgatttccgagactgcggtgtgatttccgtagctgcggtggaatttccgagactgcggtgtaatttccgtggctgcggtgtaattaccgtagctgcggtgtaatttccgtggctgcggtgtaatttccgaggctgcggtgtaatttccgtggctgcggtgtaatttccgtggctgcggtgtaatttccgtggctgcggtgtaatttccgtggctgcggtgtaatttccgaggctgcggtgtaatttccgaggctgcggtgtaatgtccgtggctgcggtgtaatgtccgtggctgcggtgtaatttccgaggctgcggtgtaatttccgaggctgcggtgtaatttccgaggctgcggtgtaatgtccgtggctgcggtgtaatgtccgtggctgcggtgtaatgtccgtggctgcggtgtaatttccgtggctgcggtgtaatttccgaggctgcggtgtaatttccgaggctgcggtgtaatgtccgtggctgcggtgtaatgtccgtggctgcggtgtaatgtccgtggctgcggtgtaatgtccgtggctgcggtgtaatttccgtggctgcggtgtaatttacgaggctgcggtgtaatgtccgaggctgcggtgtaatgtccgaggctgcggtgtaatgtccgtggctgcggtgtaatgtccgtggctgcggtgtacttcccgaggctgcggtgtactttccgaggctgcggtgtacttcccgaggctgcggtgtaatttccgaggctgcggtgtaattcccgaggctgcggtgtaatttccgaggctgcggtgtaatgtccgaggctgcggtgtaatttacgaggctgcggtgtaatttacgaggctgcggtgtaatgtccgtggctgcggtgtaatgtccgaggctgcggtgtaatgtccgtggctgcggtgtaatgtccgaggctgcggtgtaatgtccgtggctgcggtgtaatttacgaggctgcggtgtaatgtccgtggctgcggtgtaatgtccgaggctgcggtgtaatgtccgaggctgcggtgtaatgtccgaggctgcggtgtaatgtccgtggctgcggtgtaatgtccgtggctgcggtgtaatgtccgaggctgcggtgtaatttacgaggctgcggtgtaatgtccgtggctgcggtgtaatgtccgaggctgcggtgtaatgtccgtggctgcggtgtaatgtccgaggctgcggtgtaatttacgaggctgcggtgtaatttacgaggctgcggtgtaatgtccgtggctgcggtgtaatgtccgaggctgcggtgtaatgtccgtggctgcggtgtaatgtccgtggctgcggtgtaatgtccgaggctgcggtgtaatgtccgaggctgcggtgtaatttacgaggctgcggtgtaatttacgaggctgcggtgtaatgtccgtggctgcggtgtaatgtccgaggctgcggtgtaatgtccgtggctgcggtgtaatgtccgtggctgcggtgtaatttaccgaggctgcggtgtaatgtccgtggctgcggtgtaatgtccgaggctgcggtgtaatgtccgaggctgcggtgtaatgtccgtggctgcggtgtaatgtccgaggctgcggtgtaatgtccgaggctgcggtgtaatgtccgaggctgcggtgtaatgtccgaggctgcggtgtaatgtccgaggctgcggtgtaatttccgaagctgcggtgtaatttccaaaaatgtaaagtctatatttgcctggatattgaggctatgtcaggtgactataggattcttgtatcttctggattattgtatctctgattcccccatccattattgagactttcatgaccatttgaatgagaaggtgagatgaatgtaattaaataactttccgccttcattgccatccccccagtactagcaagatactatataatggtaatcttgatccatttatttgtaataacttggcactgtcctgaattttctacaggttttatttatttattgttcctggtcactgtctctttgaggattggtatctctgctccagaaaagatggcagcctctttcttctctgattttggtcttatgtggtatctggaggagctcaaaaaggaggagttcaggaaatttaaagaacatctcaagcaaatgactttgcagcttgaactcaagcagattccctggactgaggtcaaaaaagcatcccgggaagaacttgcaaacctcttgatcaagcactatgaagaacaacaagcttggaacataaccttaagaatctttcaaaagatggatagaaaggatctctgcatgaaggtcatgagggagagaacaggtgagggagtctgggaagggggaagccttcttataatgaggactatgtcctaattttggtgagtggtctctgcctgtctacaacaggacctgaatgtgctatgggaaaatattaggtttttttttttttttttttggtagacggagtcgcactttgttgcccagacagtgcagtagtgtgatcttggctcaccgcaacctccacctcccaggttcaagtgattctcctgcctcagcctcctgagtagctggaattacaggcgcctgccaccatgcctggctaatttttgtatttttagtagagatggggtttcaccatgttggccaggctggtcttgaactcccaacctcaggtgatccacccatcttggcctcccaaagtgctgggattataggcatgatccaccatgcccagcctgaaaatattgtccttgtaggcaggaaatggtctcttagacgtggtggttacatgtgggtaaaatgtcagtggctattatgtcctaacctgtattgtacctttatctgggtcaccaatgatttttaccctaagctgagaacttgcagtcaagccagaaactctgtgaggtgaagtcgttgcataagaactatgcacctgacttatttgcaagagcaattaacacctgcggtagaggatacagtgaactgaggttgactggtgtaatcatgtatttagccaaagttcacatcagacaagcaatgatctataagcaatatggcttttagagtcacatttgtatttatcctggcataaggtgttaactgttactttgcacatttgcgttatcaatggcaggatatagctctttcaactttactgccaaattgtttttctttgttgttgttcagtgtcttactgtgatgtgcctggatgtggctttgttttcatcctgattgggattctttaatattcttgcatctgaggttcagtaactttcttcagttctcaattttagccattgtctgtgtattccattcttctgtttattcttctgggactccagttacacctactggactttcttgtttgtttgacacagggtctggctctgtcacccagggtggagtgccgtggcatcatcacggctcactgcagcctcaacttcctgggctaaatgatctgccacctcagcctcccaagtagctgggactacaggtgtgtgccaccacgcttggctaattgcacacctggctaaccttttaaaaaaaaattgtagagatgagctctcactatattgcccaggctggtctcaaactcctgggctcaagtgatcctcctgccttggcctcccaaagtgctgggattacaggcctgagccaccatactggcctagactcactctttctttctctttctcttttcctttttctttctctttctctttctctctctctctctctttctgtctctctttctctctctctctctttctctttctttcttgctgtctctttctctctctcgttctgtctttctctctcttcctctctctttctctcttgctatctctttctctctctctctctctttctctttctttctctttctctttctctctctctttctgtctttctctctatttctctctttccttctttctttcttctttgatacagagtcacgctctgtcgcccaggctggagtgcagtggtgcaatctcggcccactgcagcttccacctcctgggttcaagtgattctcctgcctcagcctcctgagcagctgggatttcagatgcccgccaccacacccggctaatttttttgtatttttagtagaaacagggtttccccatgttggccaggctggtctcgaactcctgacctcaggtgatctgcacacctcagcctctctaagtattgggattacaggcatgagccaccatgcctggccttgatttcttaaatttagttcacatgttttatttatgcagtttgcctttttcacagacttccattttttctcaatatttattccatcttctattttattgagcattttaaattattttaaaatttgcctgaagattttaacatttataggtctgtttctactgtttctttttctctttatctggtcatacagtctcctagtatgtccggtaattttgagtgccagattttgaatatgagacattgaaaatgttaagaatctgtaatatcttgttccagtgaaattggaattgattctggtagtagttacagggaaatttccttaatattgaggattaaaataattggtttgaaataaaataatttgagagtttccatttttggcgatgctagcctttcttgctcattttcttgatttggaacatcacttggaaaaaacccctcccagtccaatttttttttctttgagacggagtttcactctttcacccaggctggagtaaagtagcatgattttggctcactgcaacctcactgaaccccccaggttcatgcggttctcctgcctcagcctccggagtagctgggattataaggcgctcaccaccacgcccagctagtttttatatttttagtagagacgggattttgccatgttggccaggctggtgttgaactgctgacctccggtgatccgcccgccttggcttcccaaagggctaggattacaggtgtgaaccaccacacctggccacccagtccaaatttttaaacaaattcccccatgtttcctggagtgttttggtgtcacacgctgaggtctcagctaccctggaagctgaggcaggaggatcacttcagcccaggaggatgaggctgcagtgagctgtgtttgtgccactgcactccagcctgggtaacagagtgagaccctgtctcaaaaaagtaatttatataaagaagaacattctttgcacatggaaccattttagaatattgctaaaataaaatgtaagcaggtctaaagttagatcttccactgggtacttacacttctctcttttcacagttggtttgaggttgtacccacttaattccccttatgagcaaccaaacatgtcaccgaaatctccagaacagctgagaagaccaggaaagcaggaagccattggggaatgggcaaacaacttagcttaagatgctaataggatcttcaccaatgtcagatggcattttcaccagttagggacttcaggggactgaaagattgggggaatcccttgttctccccaaaaacttaaggtagcattacctactgtcagcagtctgtgggcactggattatatctttcacctgcatccaatcaaatccagtaactattatgcggggcatagggaaaatttcccatctacaactgccccctacatctccagtccatcagcagctactcacttgcagaatataaacatcgtactagttatttaaggaacagataactgtaaaggagttttcggcctggctgaaggatcagcctctaggctggtgctccagagatgactgtaagaactatagtatcagggagctgctgcctctcctgcaaagaggaaagtgggagatgggaagctcactgttagaactgtggctttagaaatacaccacgacagctatgattcagaaatcgggaagctcaccagtgtagcagctgcttaaaatcaatgaccacagcaactggttttagttttcgagacagtctcgctctattgccagggctagattacagtggtgcaatctctgctcactgcaacctccacctcccaggttcaagcgattcttctgccctggcctcccgagtagctgggattataggcctgtaccaccacgcccagctaatttttgtatttttagtagagatggggtttcaccatgttgaccaggctggtctcgatctcctagcctgaagtgatctgcctgcctcagcctcccaaagtgctgggattataggcgtgagccactgcgcccagccaactacagcaactggagacaagccttctgttacagaagagtccagcgtctgtgtgttcatggaagctggcagcaaaacaggcagaagatagactccactccccttccccttccagtgtcatgagagtgagggccaatcgcagaacttaatctgtaccttgatcttagctacgaggggttgtgggatgcgtagggcttggtcatcactgttgctggatcttttttttttttttttttttttgagacggagcctccttctgttgcccacgttagagtacagcagtgccatctcagctcactgcaacctctgcctcccgggttcaagcgattctcctgcctcagcctcccaagtagctgggactacaggcacacaccaccacgcccggctaatttttgtatttttagtagagacagggtttcaccatgttggccaggatggtcttgatctcttgacttcatgatctgcccaccttggcctcccaaagttctgggattacaggcatgaaccactgccccggcctgttgttggattttttgattggcttttcttttgagaattctgccattgaaagaaagctcactggcataaagttggaatggatgcgaggtgccattctatcctctctactgcatctcctctctcttctggaggcaactgcctaggtcaggtcctttttaggtggactttcagatctagtccctatatgtgaaacctatatgtgtatataaatcccttgtttatgcaaattgagtacatgctatagacaccgtcctgttgcttatccatatgaagagattattccatacttttaatatttgtataatagcttgtgtctcataaattatttaactggtcttgatagtcatatagctattttccatttattttgctatcatcgtagcaatgaatacctgtgtatgtgtctattgaaagcagaagttgtcaaactttacatagtagcaatgaatgtatatgtgtgtgtgtgtgtctattgaaagcagaagttgtcaaactttacgtagtagcaatgaatgtgtgtgtgtgtgtgtgtgtgtgtgtgtgtgtctattgaaagcagaagttgtcaacctttttgtgtagaggaccatatggtttccattttaggctttgtgagtcatacggtctctcatagctgttcagctctgctattcaatcaggaaggctcctgtagacaatatacccgtgaatggtgtagtgagttctaatgaaactttatttacaagaggagactgaccaggtttggcctgggggccacagtgtgtagacccctggaaagatacatcctgagaagaaaaaaagaatatatgcaggaatgcttaactttgtgggttttctctcctcttgccctcactgactcaggatacacaaagacctatcaagctcacgcaaagcagaaattcagccgcttatggtccagcaagtctgtcactgagattcacctatactttgaggaggaagtcaagcaagaagaatgtgaccatttggaccgcctttttgctcccaaggaagctgggaaacagccacgtacagtgatcattcaaggaccacaaggaattggaaaaacgacactcctgatgaagctgatgatggcctggtcggacaacaagatctttcgggataggttcctgtacacgttctatttctgctgcagagaactgagggagttgccgccaacgagtttggctgacttgatttccagagagtggcctgaccccgctgctcctataacagagatcgtgtctcaaccggagagactcttgttcgtcatcgacagcttcgaagagctgcagggcggcttgaacgaacccgattcggatctgtgtggtgacttgatggagaaacggccggtgcaggtgcttctgagcagtttgctgaggaagaagatgctcccggaggcctccctgctcatcgctatcaaacccgtgtgcccgaaggagctccgggatcaggtgacgatctcagaaatctaccagccccggggattcaacgagagtgataggttagtgtatttctgctgtttcttcaaagacccgaaaagagccatggaagccttcaatcttgtaagagaaagtgaacagctgttttccatatgccaaatcccgctcctctgctggatcctgtgtaccagtctgaagcaagagatgcagaaaggaaaagacctggccctgacctgccagagcactacctctgtgtactcctctttcgtctttaacctgttcacacctgagggtgccgagggcccgactccgcaaacccagcaccagctgaaggccctgtgctccctggctgcagagggtatgtggacagacacatttgagttttgtgaagacgacctccggagaaatggggttgttgacgctgacatccctgcgctgctgggcaccaagatacttctgaagtacggggagcgtgagagctcctacgtgttcctccacgtgtgtatccaggagttctgtgccgccttgttctatttgctcaagagccaccttgatcatcctcacccagctgtgagatgtgtacaggaattgctagttgccaattttgaaaaagcaaggagagcacattggatttttttggggtgttttctaactggccttttaaataaaaaggaacaagaaaaactggatgcgttttttggcttccaactgtcccaagagataaagcagcaaattcaccagtgcctgaagagcttaggggagcgtggcaatcctcagggacaggtggattccttggcgatattttactgtctctttgaaatgcaggatcctgcctttgtgaagcaggcagtgaacctcctccaagaagctaactttcatattattgacaacgtggacttggtggtttctgcctactgcttaaaatactgctccagcttgaggaaactctgtttttccgttcaaaatgtctttaagaaagaggatgaacacagctctacgtgagtccatcctatgactttttctctcttctcagaatctgtctgtattcccaagtgggttttgctgagggagtgtttaatataggatcatggttagaaactcattttttctgccacaaaacctcagctcacatcctggcccaacattttaggagctcttagactttgtctgtgagccttgcccttttgtggctgcagtggccccattacagaagggggaataataattgtattgtgaggagtgaatatgaggacctgtgtgaagagtgtttcctactttctcaagtattagctgatcagtactataatcgatatttttccatagcaccacactccctgtgtcttgacctctcagctgcaagttacctttgaaaacttagtctaaaaaatcatacagcccgggtgtggtggctcatgcctgtaaccctaccactgtgggaggctgaggcaggtggatcacttaaggtcaggagttcgagactagcctgaccaacatggtgacacctcgtctccactaaaaatacaaaaattagccgggtgtgtagcgcacacctgtaatcccagctacttgggaggctgaggccggagaatcacttgagcccgggaggcagaggttgcagtgagctgagatcgcaccactgccctccaggctgggtgacagtgagactctcatctccaaaaaaaaaaaaaaaaaaaaaaaaaacaaaacacaaatcatacaaattttcttcttgttctttttttttttttttctgaaatggagttttgctttgtcacccaggctggagtgcagtggcgagatcttggctcactgcaagctccgcctcccaggttcacgccattctcctgcctcggcctcccgaatagctgggactagaggggcccgccaccac[183 bp omitted]caacactttgagaagctgagcaggaggatgcttgaagccagggggctaagaccagcctgggaaaaatagcaggaccccacttctacaaaattttttttttaattagccaggtgtggtggcatgtgcctgtagcacagctacttgagggaggctgaagcaggaggattgcttgcttgagcccagaagtaagagactgcggtgagccatgatcgtgccactgtataacccagcctgggcaatagagcaagaccccatctcaaaaaccaaaagaatcatatgaggtggatcctattatcctgttacaggtgaggaaactggggcaaagaagtcaagtgagctggatcctatccagtcaaggatcctgtatttaggacatggagagttttagggctgagcctaggctgaagatgtcgacttaatggctgggctgtgctgcctcatcttttactgtaaaccagcctgaccaacatggcgaaaccccgtctctactaaaaatacaaaaattagccaggcatggtggcacgcacctattatcccagctactcaggaggctgaggcaggagaatcgcttgaacctgggaggtagaggttgcagtgagccaagattgtgccattgcactccagcctgggcaacaagagtgaaactccatctcaaaaaataaacctattttggatgtgagacagggtttctcagccttggcactggtgatgttttgggggctggctctcctgttacagtggggggctctcctgtgcattgtaggatgttcagaaacatccctggtctgtactcactagatgccagaagcacccctcccttaagctctaacatccaaaaaggcctctagacatccccaaatgtcccctggggggaaacgtcaccccaggttgagaaccactaacataaggtgacttacctgaagggtcccgttccttctgactgagggaggctctgcctcagacatcttctgtttgagaagacagcgtagtgcgtatatgtgttacaagtggctcgtgttgaccgcctgcctgtggaaagctcgtcctttcttgaccacaggtcggattacagcctcatctgttggcatcacatctgctctgtgctcaccaccagcgggcacctcagagagctccaggtgcaggacagcaccctcagcgagtcgacctttgtgacctggtgtaaccagctgaggcatcccagctgtcgccttcagaagcttgggtgagttgagaatcgacttcgactcgagtatgtcacggagatgacctattcatctcacctctagctttcagtcgaggctaactgcacaagcaaagaattaacatccagagcagttgctcaacctcagcacttacagacatctcatgcagatcattcttcatcataggggttgttctgtgcgttgtagggtgttaagatgcatccctggtctctaccctctagatcctaatagcatccccttgtccagataaccaaaatagtgtccagacactgccagctgtcccttgtgggggcaaaatctctcaagttgagaactactgagctgtgtcattgggctgtgaaatcagagaatgagttcatgatggatgatgagagacaaacacaggtgtgcaggctgtgctcccattagatgaaactcatccaaaattttctttgtttttgcagaataaataacgtttccttttctggccagagtgttctgctctttgaggtgctcttttatcagccagacttgaaatacctgagcttcaccctcacgaaactctctcgtgatgacatcaggtccctctgtgatgccttgaactacccagcaggcaacgtcaaagagctagcgtaagtctccgtttattgagaccactgattgggtttcagagaagactatagcctaagtctccgtttattgagaccactgattaggtttcagagaaaactatagcataagtctccgtttattgagaccactgattgggtttcagagaagactatagcgtaagtctccgtttattgagaccactgattgggtttcagagaagactatagcgtaagtctccgtttattgagaccactgattgggtttcagagaagactatagcgtaagtctccgtttattgagaccactgattgggtttcagagaagactatagcgtaagtctccgttattgagaccactgattgggtttcagagaagactatagcgtaagtctctgtttattgagaccactgattgggtttcagagaagactatagcgtaagtctctgtttattgagaccactgattgggtttcagagaagactatagcgtaagtctctgtttattgagaccactgattgggtttcagagaagactatagcgtaagtctccgtttattgagaccactgattgggtttcagagaagactatagcgtaagtctctgtttattgagaccactgattgggtttcagagaagactatgtatttctttttgtgttgggggagggggctgcatatttgaagacatccactttttccttctatgatttgtatgcaaacttagtttcctgagaacttggatagggaagttaaagtttcccaattgatgtagccatttcggaaaactgtgtgtattcagccttcatggattctggcagattatgtaacccaataattccacctggaggtgcacattcgacagagggacctgtctcagtttgctgaaagacaggcactaaagcattcccagcaggtgttcataatctctgagaagtggaaataccactgacagtaagttggataagaaacctgtggttacatgctcctgttccatgagaaagaacactctcggtcgtatgcaaaaacctggacaaatctcagacattgttgatggcaatgagccagactcaagagtacatcctatggctttattcctgtgaagttcaaagatggacaaggctctggtgttggaggttcgggcagtgtattcacacgttctcgcgctgctataaagacatacctgagactgggaatttataaataaaagaggtgtaattggcttatggttctgaaggatgtacaggcttctgcttctggggaggcctcaggaaacttacaatggtggcagaaggcaaagggaaagcaggcacgtcttacatgggggagcaggaagaagagagaagagggaggcgctacacagttccaagcaaccaggtcgcgtgaggactctgtcacaggaacagctctaggggatggtggtaaatcactagaaaccacccccatgattccgtcaccccccaggcccctcctccaacactgggattacagttcgacgtgagggttgggtggggacacagccgaaccatatcagacagcggttacttttgttaagatagtgaaggagaggggtacaggagaatgatgaacctgctctgtttcttgacctggatactggtaactcaagtgccttaaattcatgacagtgcgttggctggcacttaaccattgtgtgtactttccagtatgtatgttttaattcaagcatttttatttttgcaattaaataagggtttcctgtaaatacttaccctctacttaccttcattggtacccacacattcaaatacttctctatactagtctttgttggccatttttctgagcttgcatcaaccgaacacaaaaagacccaaacccttttttaaaaaataacaactttattgtgatatccacataccacaaaacatatacttttaaagtatgtacttcatatattttaagaaatacttttaaagtataactatgctttaaaatgtacagtttagtgatcctcatatatattcatgaggaagtacaaccatcatgactgattttagaatgttctcattacctcagaaagaaaccccatacccattagcattcactcctcactcccttatctctctggtccctgggaattactaacatactttcagtcctattggattttcctatcccaggcgtctcatgtaagttgaatcacatgtggtcttttgcgaatggcttactttcacttagcaaaatgttttcaaggtttatccaaattgtaccatgtatcagtacttcattccttttcttggctaaatagtattccactgtgtagatattccccattttgttcttctagtcctctagtgatgaacacttgggttgttaccaccttttagctattctgaatagtgctctatgaacactcatgtgtgaacacctgctttcaatccttttggacttgtaaccaggagtagacttgctaggtcatatagtaaatccatatttaactgttagagaaaccaccaagttattttcctcagtgactgcacaattctgtattcctaccagcaatgtatgagagttctaatttctccacatctttgcttattttttacttatttacttatattttattattacttatatttacttattttttattatacccatcctagtagatgtgaaggagcatctcattgtggttttgatttgcttttcctgaatgactaatgatgagcatcttttcctgtgctttttgatcatttctatatcttctttggagaaatatatattcaagtccttcacacatttttaaaaacttttattttacattcaggggtacaggtttttaaacatttaaaaattttaacatttaaacaacattttaaaaaacttttattttacattcaggggtacaggtttattataaaagtaaatggcacgtcatggaagtttggtgtacaaattatttcgtcacccgttaataagcatagtacctgataggtagatttttcttccccaccttcttcccaccctctgctctcaagtaggccctggtgtctgttgtccttttcttcatgtctatatgtactcagtgtttagcgtccacttataagtgagaacatgtgatatttggatttatgttcctgtgttagtttgctaaggataatggcctccagctccatccatgttgctacaaaggacatcatcttactcttttttatggctgcatagtattccatggtgtatatgtatcacattttctttatctagcccactgttgatgggtatttaggtgaatagtgctgtgatgagcatacaagtgcaggtgtctttatagtacaatgatttatattcctttgggtatatacccaataatgggattgctgggtttgatggtagttgtgtttgaagttctttcagaaattgccaaactgctttccataatggctgaactaatttacattcctacaaaaatgtgtaagtgtacacttttctctgcaacctcaccagcatatattatttcttgactttttttaataatagccattctgacctgtgtgagatggtatctcattgcagttttgatatgcatttttctaatgattaatgagcatttcttcatatggttgttggcaacacctttgcacatttttaattggattttttgcctttttgtcaagttgtaagtgttctttatgttttctgattacaagttatatacgagacgtactttgtgaatattttttgccattctgtgagttgtcgtttcactttcttaatggtgtcctttgaagcacaaaagcttctaatctgatgagatgcactttatttttttcttttgtctcatgtgcttttggtgcaattgctacgaaaccattgcctaacccaaattcattaagattaacttctttgttttcttttctttttttttcccccaaatttgagatgagtctcactctgtcacccaggctggagtgcagtggtacaatctcagttcactaaaacctccgcctcctgggttcaagtgattcttctgcctcagcctcctgagtagctgggactacaggtgcccaccaccatgcccagctaatttttgtatttttagtagagatggggtttcaccatgctggtcaggatggccttgatctcttgacctcatgttccgccctccttggcctcccaaagtgctggaattacaggcttgagccaccacgcccggccgcaccaacctatatcttaaatctagaaagaacattaaaagcatgcatggcctcagagccctgctgcagaggcgtgaggagccatggactcggtgacttgccaattccacatttatttctggacaactcccataatggctttcatctttattctgttgtctctgagcttattttttgtggcaaccagaggtaaggagagtggttgaggtaatagaaaaccacacagttaaaccacacagttgtgaggcaacacaaatcaactcaagccaccaaaaaaggagtcctaggggactcgggttcaaggcttcttccatgttctttgaggagatattacttgagcagagacctgaatgataaagatgcatctaaccacaggccagaaaaagagcattccacttggcgggcacacatgcaaaatagcccaagttgagtaaaggagccactagacacgagtttggggaggatcaaacatgaataatatcttagagaatgaaacctgtgttgtcaagcaactgaaaaagaaccagggtggctgggacatggggacttgggaatgggtaggacccttgtggatcatgttgtatattttgggattttctccaagtgcagtgagataagttactgggggaggctaagccaagcatgcatataactgacactgtgcgtctcaggttggctgtctctgtaccccagagaccgtaagccaagcatgcatataactgagacggtgcatctcaggttggctgtctctgtaccccagagaccataagccaagcatgcatataactgagacggtgcatctcaggttggctgtctctgtaccccagagaccataagccaagcatgcatataactgagacagtgcatatcaggttggctgtctctgtaccccggaggccataagtcaagcatgcatataacagatggtgcgtctcaggttggctgtctctgtaccccagagaccgtaagccaagtgtgcatgtaactgagactgtgtctcaggttggctgtctctgtaccctagagactgtaagccaagcatgcatataactgagactgtgtgtctcaggttggctgtctctgtaccccagagaccgtaagccaagcatacgtataactgagatggtgcatctcaggttggctgtctctgtaccccagagaccgtaagccaagcatgcatataactgagactgtgcatctcaggttggctgtctctgtaccccagagactgggttgacagggatcaagaacagggttgggaggcagtgagcctctcaaggacagcaaatgtgggcttcccgactctgacaggattggcaagaggaatgagtccaggaactagaaaccaacagaatgtgacattttccctttcctgcaggctggtaaattgtcacctctcacccattgattgtgaagtccttgctggccttctaaccaacaacaagaagctgacgtatctgaatgtatcctgcaaccagttagacacaggcgtgccccttttgtgtgaagccctgtgcagcccagacacggtcctggtatacctgatgtgagtggatgttgggggtgcctactgtggagggccatggcggcagttcaaacctgggcctattgatgacagtctgctcattgatggaggccacatagcggaggtttaaaagctcacgcttaagaatcagaaaagacttgagttctagttcaggatttatcacgtatatactgtcttcttaagcaaaatatttaacttagaagcagaggaaaatcctgtcttagaggtcttatggctatcaagtgagactgtctatacagaacacgtactgtgtttcaaagctgttaggttgggttaatgcacctgcaacacacatggtacttcccgtgttgataacggttatttcgagcatgtagaatagacttggtgggtactcaggacagtagcggggaaaaatgtctatgggcctcttgaccccagttaatactataatacatgtgatgttcttgcagtaataggatgagaagaggctattcaagccagttttagggtacgtaaaacacagaaggaagacagatgagtaagtgttaaaggccaattgatttacctattaatggaattctaatacctttaggtgatacttatacaaaaggggagaggacaggagaatatatatgcatttgtgtctttttttttttttttgagttttgagttttgctcttgttgcccaggctagagtgcagtggcatgatcttggcttatcgcaacctctgcctcctgggttcaagcaattcccctgcctcagtctcccaagtagctgagattacaggcatgcgccaccatgcctggctaattttgtatttttagtagagatggggtttctccacgttggtcaggctggtctcgagtgtgtctattttttaaatacacaaatatcactggaagaaatagtattataatataggctgcctgtgagaaatagaactgagaagctgggagataggggaggatggagatttttccctctttatacttttgggcattttgaaatatgaacaacatgaaagtaagagtattctgaaaatgtcaagaaaatgagaggatttatacctcgagctaaaatagagggacagggacaggacttaacctcccacctaaaacaaccaaaaataaccaactaaataaaacaactgtttaagacttcagacatcaggcaatgaaggacagtggtgcctgagtgataagggacaaacaggtgagtcctagaattgtcccaggtaactatctggagagagatttcagg[133 bp omitted]tcgagggaagctgaggctggagaatcgcttgaacctgggaggcagaggttgcagtgagccgagatcgcaccaccacacttcagcctgggtgaaagagcaagactgtctcaaaaaaaaacaaaaaataaaccaaaaaaaaaacaaaaaacaacaaagtccacaaatgcctggatatgccagaaaattgagatccgtgagagaagcaagctgggtgaggcctccgtggaaatgcagatcttgtgtctgtcaacaggaagcagttgcccgttctgtcctagcctgttggatttccatgtgggaatgcggctcattattgccagatatcccagttttcaacagaggttgaaatctagattttacatacaattttactgatggttatatattgccaactgattttgttaaacataaaaatgccaggaaatctaaatatccgtaggccatatgtggttcgttcatcactagcttgcaccgtctgcttttttgtttttctctactccacacttttttttcaaagtcaacatggatccttaaaaaaaaaaaattcataaactggctgggattggaggctcacacctatattcccaacactttgggacgtcaaggcaggtgaattgtttgagcccaggagttcaagaccagcctgggcaccatgatgaaaccctttcttgacaaaaaaatacaaaaattagcttggtgtggtggcacgcacctgtagtctcagctactcagaagactgaggtgctgaggtgggaggatcccttgagccagggaggtagaggctgcagtgagctgtgatcatgccactgcactccagcctaggtgacagagccataccctgtctccaaaaaaaaaaaagttttgaacctactgtgattttaaagaataatgaaattgaaaaagttggggattctacacatgaggtaatcaatacactttaccagtccctgagggagcggtctcagaaggtccatgtcttgtccaaggacatcatcagatgaagaattagaaccaaaattaaagccctgttagagtattagctatgccatattacacgatactttttccttctgcattaccctcttattttctaattcttctatcatgcaactaagaagaaatgagagggccggacgcggtggctcacgccttgtaatcccagcactttgggaggccgaggtgggcagatcacctgaggtccggagttcgagactagcctggctaacatggtgaaaccccgtctctactaaaaatgcaaaaattagcgagatgtggttgtgggtgcctgtaatctcagctacttgggaggctaaggcaagagaatcacttgaacctgggaggtggaggttgcagtgagccaagatcgcgccgttgcattccagcccgggcgacgacagcaaaactccatctcaaaagaataaatgagaggaggtgttttcagataatccagaacttcatctcagctggggagtttgtaagattatagaaatattaccctgaatgtgaaattaagcaaatctccctgagacaccacgtccctcttcactctccttctcgtgtttttgtccccataggttggctttctgccacctcagcgagcagtgctgcgaatacatctctgaaatgcttctgcgtaacaagagcgtgcgctatctagacctcagtgccaatgtcctgaaggacgaaggactgaaaactctctgcgaggccttgaaacatccggactgctgcctggattcactgtggtaggctttttgctgtttctttgaagaccaagccgtcttttcaagggcatgcactgctgagaatggggcatctggaattgaggaaggctgtagtgtctgtgcctgggcatgtgaaggtttaaaaaatacttgcttcagattcttgtcgagacgttcatgtaaacaaatcagcaccctgacttctgtggcatggatttaatatgttgcaaagagttctccagtggcatataggtagaggactgagagagccggaattaggtcgggacctgaggggcaatttcatggcgaagatgatatttggtgtgtgttctacaaaatgaatgcacttcatcaggtgcaaaaataaagccaaaattccaggtagaagggtaaaacgtgaaggtgggagatccaaaaatacacgtgagaattaatgtgtgtaacagagaatgctttagaagaagacaaagggtagcatgagatgagccagaaaggagatggtgaaaagacttaatttcatgttatcaaatagagaaatatctgggtaacccctgtagcggcggtggcagtgtttttagaattaccagttaggataacatgttgttatgtattttccctgaaaaatacagaggcttctgaaatctggcagcgtgatttttacctaatccattaggaaatcagtttaggattttgtattcctcacttgaagagtatgttaaataacataacaaaaacaccagatgcattctttctctcccagtagtgcgttaggctatctgggccaatcgttggcactgaaagacaccaaaaacatcagatacaatattaagaaaaaatttaaaagcatctagaagctaaacagaaataatcttttttttttttttttggagacagaagagtctcgctctgtcagcccacgctgaagtacagtggcacaatctcggctcactgcaa[247 bp omitted]agtagatagcacttaaggctatccaaaactccttaagacgtattaaaaaaacacaacataaccttaaactagtactgaacagatgcctgaaagaaacaagagcaaattgtctcaggaggtaggtaataggatgacatgatccttgacctcagcttattcctaaaaggattttttaaggtcagtaaataccacacagttaaaataacccaacccacaaggaaataaagctcattgagccaaggacaagtcaaaatacaaacagctaccaaactatctaattatctataaagctattatacttactatgtttacagaaaaataacaagtttgaatcttagggaaaaggagatgaaatgagcaaataatacaactagaaattataaatataataactgactatatggggtgaatagtagattagacataattaaagaaaaaattagtaaaatggaagataggttacaattacctagaaagcagcatgaaaacagaaaaataggtaaatcatagaagagggtataagacttagatgattaagatgttctaacacacttactgggaatcgcggaaagagaaaatattttaagaagactgaaatttttctgtaaccaatgaaagattccaattcagattcaagcatccaaataagcgcttaacaggataaatagtggagaaactgcagaacaccagatataaagatgttggtctgtaaagatttaacaaggggctgggagcttggggcgggggaaagtgatatctacaagaaaggagacagacttgggtgaagagtaatagtggaaaccagagggcagtacagtgagatattcagtatggcggggagacgggagggtggattgtcaacctagaattctatagccaccaaaaactatcaagaatgaggataaaaacacattttcaaataaataccaagtttcttaccaccagatccttcctaaaagtaattctaaagactgttccttagacagaagtaaatcattccagatggaagagagatagagcaaagagaggggtagatctctggataaatctaaacaaaatgtggattgtgtataaaaataataccatcttgaagatttaatggaaaaaatatacaacagccataacaaaatataaaggggtaaattaaggtgaatactcaaattagcagaaaagaggagacagaatgattaaaaaattcccgatccaaaaaagaacaaggaaacaaaaattgaacaggtaagaaaatatgaaacaagatatatatttgaattcaaatatgctagtaattaaacgaacagattaaatgtttcagctaaaagattgccatattaaaacgtaactaatgtttataagttacttattaaaacgtgaggttgtggttgtacaacattgtgaactgtagtaagtgccactgaactgttcactttaatatagttaatcttaagtaaattttacctcaataaaatgatgaaaatgaaaggatagaaaaaaagaccacgcaaatattaaaaggaagcttacgcaactgtatgaatcagacaaaatagaatttaagacaaagtattattcggttcatgctaatttttaaattatcttcctactcagttgaactttaaatcttacaaggtgaacataattacttcccatatagagtccaggaatctaagagaaatcataatggaaattagaacatatgttgaaatgaaaaaggaatatactttgcaacaaactcagatggagctgtagtgcatgtatatattttaaaaggaatctaaagaataatgaacttaaggatttttttaatggtaaaataaaccccctaaaggatggaaggaaataaaaataaggacagaaactaatgaaacaaaaatcacaatggaaaagatcagaaacctgcagggtggttcttggaaaaaacagtttttgttaatgccatcctatagaatataatgcaagccacacatgtaatattaaattttcaagtagccatattaaaagtgatgtaatatttgaaagtaattttataagtaaatatttgaaactaattttaataatatagtttatttagccatatatcaaacatcacttcaatatgtaatcagtacaaaaaattactaatgagagattttacttttttgtattaactctctaaggttcactatgtattttatactatggcacatctagattcagacaagctacattccaagtgctcagtggtcacacgtggctggctatcacactgaagagtgcaggtctatgtcaagaatgggaaaagaaacattactacagatgctacagatattaaaaagattacatatgagcaactttacacaataaacttgaaaatttagatattttcaagactcaataagcttctaaaatgatagaacctaaatgtactcaagacaaaagaaaaatgaatcagtcaaatctttttatatagaaaattccaggcttagaagccttcattggtgattcttaccagacattcaaagaataaataattccactcttacatcagctttttcaggatcagaagaggagaaactccccaccattttttgtggctagcataatcttgatgccagaaaccaataagaattttattggttgtaatataatccttacaatttttgtaagaaagcagaattaaaggctagtgtcattcatgaaatgcaaaaacactgaacagaatattagcaagcagaatccataaatgtattaaaagaataaacataatgactaagttgggcttatccccaaaatgtaaagttgctttaacattaaaaagattagtaaaaaaatcaatgtaaatcactttactggttaaaaataaaaatcatgatctaaaatgcagaaaagtttgaattaagacatacaattcttgaaaaactatttgggaacttccttgatgatctaaagaatatgttcaaaaaaatctaaagcaaacatttgtctaatgatgagagaaaagctttctcttcaatatcatgaaaaagataagaacggtggctataatcacttctagtcaacagtgtcctgaaaatcttagcaaatgcttcaaggtaagaaaaacactaaacctgtaatctttgaagaaacacctaattctatacagatgatttgaatgtacatagaaaaatccaagaaaatctgtagctaagttatcagaattagtctaacaagcttgcttgaaacaatatatcaaaaacagttactgatataccaacaagaagtaataagctagtggaattaaataaaagtaccttttacagtaacataaaaaagaaattacctagaaatagctactgtgatatatgtgagacttttatagagaatatgatcaaattatggtataaaacaatgttatattcaaagattgaaatattcagtatctaaaaagtcagttttctgtaagttgaattcatttgctttcatgaaatcccagtgaaaatgcgatgtttttgtttggtgattgagttgaacttgaaaagtaaattttaaaatgtgtatggaacttgcaagaggccaagaatacctaagaaacacctaaaatataaaaagtgggccaggcgcggtggctcacgcctgtaatctcagcactttgggaggctcaggtgggtggatcacctgaggtcaggagttcaagaccagcttgaccaacatagtgaaaccccgtctctactgaaaaaaaaaaaaatacagaattagctgggtatgatggtggatgcctgtaataccagctactcaggaggctgaggcaggagaatcacctgaacccgtgaggcagaggttgcagtgagctgagattgtgccgttgcattccagcctggacaacaggagtgaaactccgtctcaaataaaaataatgtaggaactcttgctctaaatgtgtcatctaaagttttagaaattaaaaaagcatgagattcacacagggataagcagacagaccagagacacagaatagagatctcagaaacagactgatccacgtgtgttcagatgtcgcatcatggaatagcgtatcactggtgcagagagaggatagacctccaacaaacgatgctgagacaattcagttgtccctccatatccataggaggttggctacagatttcccctgaggagtccaaaatctgtagatgctcaagttcctaatgtaaaatggcatagtgtgtgttttgagacagtctctcactttgtcgcccaggctggagtgcagtggtgcgatctcagctcactgcaatctctgcttcccgagttcaagtgattcttgtgcctcaacctcctgggtagctgggactacaggcacgcatcgccatgcccggctaattttttgtattttttgtgttttttttagtagagatgagggtttcaccattttggccaggctggtctggaacttctgacctcaggtgatccacccacctcagcctcccgaactgctgggattacacgcatgagccaccgcatctggcctatatagtgtttgcatataatgtacaggcatcttcccataatactgtaaatcatctctaagttactgtgatatgtaatacaatgtaaatgttgtgtgaacagttgttatactctattggttttttcgtttgtattttttagtgttgcgtgttatgtgttattgttttaattcttcaataatttcaatctgccactagttgaatctgtggatatggaggactgacggtgcctatccacatgaatgacaaaggctgtcgtgctttggtgtctcttttcctgatattagactgaggtgtaatagcctttaagcatggtacccttactcctttgcagtttggtaaaatgttttatcactgctgctggctgtgaagacctcgcctctgctctcatcagcaatcaaaacctgaagattctgcaaattgggtgcaatgaaatcggagatgtgggtgtgcagctgttgtgtcgggctctgacgcatacggattgccgcttagagattcttgggtgggtatcgccaagctcctggttatgttttcatgagtggcaaagacggaaaatggatgggaagaaagagaaagatgaaaactccaacaggaccacatagcagctagctgtggttgcatcatgaaccagtgtaaaacttcagggcttaaggcaatgagaagttagattgctgctggctctgcttgtctgggcaggcgtcactgacctcagccaggtgtgcttaggaagctgtggttaactgagggattggctggtttgggttgaccttgctatatggtatggaggttggctggctgggttggctgtccccttggggatgacaggtgtaactgggccacgtctcattatctaactggttggcctgggctcattgacatggcatctgtatcagtttgccagggtttaaaaagtagcatggactgggtggcttaggtaatgaatttatcacttcacggttatggaggctgaaagtctgagatcaaagtgtcagcagagttggctccttctgaaggccatgagggagaatctgcttcaggcccttcttgtcttgtcgataaccatctgtcttctccctgtgtcttcatgttctcttccctctgtgtgtgtgtgtctaaatttcctcttataagaacaccagtcatatgattagaatccccccagtgtcctcattttagcttaattgcctctataaagaccttgtatccaaatatgatcacattttggggtactggggtttaggacttcaacgtataaattttggcagggacagaaatgagcccatagcagcatctcaggagttcaagagatgaagtatagaaaacatccaagatcaccaggtgtgatagcttagtcctgcagtcccagcactaaaggagcctgaggcaagccaatagcttgaggctaggagttcaagaacaggctgggcaacatggtaaaaccccatctccataaaaattagccaggcgtggtgcatgcctgtagccccagttactcaggaggctgaggaaggaaaattgctagaacccaggaggtcaaggctgcaatgagccatgatcatgccactgcacttcagccgggatgacagaaaccccatctccacaaaaattagcccgcaggcgtggtgcatgcctgtagtcccagctactcaggaggctgaggcaggaaaattgctagaacccagcaggtcaaggctgcagtgagccatggtcatgctgctgcacttcagccaggatgacagagaccccatctccaaagaagaaaaacacccaaaatggtggctcagaactctcctaatcttgcttccattgttatctgagacggcttcatacctttttttggataatatgttatattatccaaagcaaggtatgaagccggaaatagactctgttagtggaatgagctgcaaagtcacattgctgtgggcagggatacagagaagaatggacacttatggctacttttaccacctacccacagacgcgtgatctgaggtcgtaaacactggactgtgagagattgcacttgaggcaatggggtgtgcctcaactagacgtctagctcacatcccatcctacctccaccctgaggctggggccgcatcttaccatgtgtctttttattgcaggttggaagaatgtgggttaacgagcacctgctgtaaggatctcgcgtctgttctcacctgcagtaagaccctgcagcagctcaacctgaccttgaacaccttggaccacacaggggtggttgtactctgtgaggccctgagacacccagagtgtgccctgcaggtgctcgggtgagctggggtctgttgtgctctatgggcagagtgctccgggctaagaagggattggctgggacctgcagtgtaatcacgttgcatttaaaatgcaaatgatgttccttgtctcagggttgttgcaggagtaagaaccaagcaggtgagtataaaactcttaccacagtaagtggtgaacagtgaatgtccaacaaatggaaacacttgtgaagtggcctcattgtctggggtaacacccgaggttcattgtcccagggccgtggagatccaaggacgcagagatccaaggacgcagatacacaaagagtgaggttaagagcagaagtttaataggcaaaagaaagaagagctgtctgctacagagaggggtctcggaaaaatggattgcccgatccatggtgaaatgcagagggttttatagacgagctggtgggaggtgtggtgtctgatctacatagggcatgaaaaactggttaggaccaggtgtgccgtttgcatagggtgtgaatttctggcagcccccaccccagtcttttattaagcaggcaggttctctgcctgagctgcactatgttgcccatttctttcttactgtacccatgctaataaaaaagggaagatggtgcttccatggtgaacaggcctggcccccaggtagctcttttcactggcgcagctgctggcattccccccatgcaatcttcgcgctcccttatttatgtttgcagctcagtttttcaggatgctctttgttagaaaagaaatgatttcttgggctggtttttgttagaagggaagctctgctgaggacttttgccctcactatctgcctaaataattttttacctcctatatcacttattattataatacaaattatgatacatgtttatattttaaatatttatgtgtaaatacaagttatatgtatattcataagtataacatttataaatagaaacttatataaacataatttatattttaatttgttatatttataattacatataatcccacaaacattattttactagataactatagagtccttaacatttttctcattcattttcccctactgttttcaaaccaatatgagatgaaggtaatcataggcagttattaggctgttcatttccagaaaagggaaatataatgggttaaaactgttataactctaacgctaaagaacattcactgatttttttttttccattttgtgaagatacaggtttgttttcttgaagtccatccttataaatctccacctggaaaggctgagtgcttggcattgtttctttctcattttaatgtttgctaaagattcagaatgtagactaccaaagtagacacgtgattaaggggaaggactcaaattgtctgcattctgagtcacggaggtctgtgtttgtctcctagccttgccatgtttggccctgtaagccagggtaaggcatttgtcctctttgattatcagcctcctatctacaaaatagggatgattatttggcatggtaattatgaaagtatgcatcagataatgtgataactatggcagaactaaataagtgagttttcatcttcctccagcccctaccatagatagtctcacaaagatgtgtattaagatacatagttgtgctaaagaacatagcttaccccaacagtgtgggacagttgcacgcaaacagatgccaaatggagatgagagatattatacgtaaaaggaaggaccaagacacggtgatacttaatccttctgattcaaagcaatgatacaacgtatgggggctccagaaacaaattgcttgaatttgtatccagactaccactttctggttttgtgaccttaacattgttctcattgtcttcatcacaagtcgggacaattatgctacctcataaggcagttgtgaacatttaatgagataggcatgtaaaaagccttagcagagggccagggcccaggtactcggataatggaaactattaactttatctttgaaaaagtaaaaatagcttcagtctttctccctaactcccactgacttcttgttgcaaatccaaatgtttgtgtggagttcatgccttctattaccaattctggacatttatttatgtccagtgacatattggagccagctcctacaagctggtgagagccacgtgtgtgtgtgtgtgtgtgtgtgtgtgtgtacctgtctttgtaactctgtttagtgacagcaagtgggcagctcaaaattggccatgattgccttggagaatttacaccacagaaattggcaaagctataaattgggactttatttattttctggggatccaggggtaacatttatcagcataccgctgcatttgatgtgtatgtctttcctcttggaggtaacaccagggtttcctaggcttgtcctgggatgaattagggagaaagatgagctgcagaaaagggaaaaagtatgtgaattaaaaatagaacctcttaaaatattttaccaggctgagaaaaactgattttgatgaggaaacccaggcacttctgacggctgaggaagagagaaatcctaacctgaccatcacagacgactgtgacacaatcacaagggtagagatctgattgcgaggaacctgggctctgactcgaacacctgcaaaggacagggactgggaccgttacttacatgacactgcacccaggagatacaaatcattgatactctgagttgtgagatttctggcaccccattcatagatttgatatgatacacgtggtttttatgtgctctgtggccttggatgagtcactgaaaggccttcatggtctctcggtctcacaaggacctcttaacccctcaataaagtgttacatttctaaacattggaaattctttttttgcctttttttatttgtataaatttaaggggtacgagtatggttttgttacatgtatatattgtgtgggaaaatctgggcttttagtatacctatcacacagatagtgtacattgtacccattaggtcagttctcaccctgcacctccctctcaccctcctgagcctccaatgtctactattccacactttttttttttttttgagatagattttcgctcttgttgcccaggctggagtgcaatggtgcaatcgcggctcaccacaacctccgcctcctgggttcaagcgatttctcctgcctcagcctcctgagtagctgggattacaggcatgcaccaccacgcctggctaattttgtatttttttttttttttttttaagtagagatggggtttctccatgttggtcaggctggtcttgaactcccgacctcaggtgatccacctgcctcagcctttcacagtggtgggattacaggcgtgagccactgcatccagccactctttatatattatttagctctcacatacaagtaagaacatgcattatttgacttagtttctgagttatctcacttaagatcatggcttgagttccatccatgttgctgcaaaagacatgattttattctttttatggctgaataggattccactgtctataaatcatgttttcttgatccactcatctgctggtggacacttatgttgatcccatgactttgctattgtggagagtgctccagtaaacacatggatgcaggtatctttttagtatgatttctcttgctttggatagaactcggtagtgaggttgccggacaaaatggtagctctatgtttagttctttgggaaatctccatactgcctggaaaatcttgaaacagtgtttgctactgatgaatgactggaataggagtgcaggttgaagaaactgtggccccctccccgtgttgacttggaaagacgctggccacactgaaagcactagaaaggctggtctgacttgggcacccttctttctgccagtcctactaggattccaggttgggctcctgatctgttcttgcctgatgaaagcaccttttttattggtacataatagtggtatatattttggggttcatgtgaatgtttgggtaatttccatggcattgctaatattacctctcctcacggtctttgcctctcatattcttccccaaactcccctctggctctcctttcctcattgggcctcttgagttctgaggctaccctgtctcccctacctttgaataaagatctcttgggagtgggagctgaaaggaaattttaggaatgggggtatttcacttctgaatttttttttttttttttttggagacagatcctcgctctgtcacccaggctagattgcagtggtgcgatctttgcccactgcaccctccacctcccgggttcaagcaattctcctgcctcagcctcccgagtagctgggattacaggcgcgtgccaccacacatggctaattttactatttttagtagagacggggtttcaccatgttggtcaggctggtctagaactcctgacctcatgatctgtcctccttggcctcccaaagtgctgcaattacaggcgtgagccaccgtgcccggcctcacttctgaacttctgtgccactgatttaggagtgaagattgagaaaatcagcaacctgaatgtccatcaatgggtgaatggataaacaaaatgtggcatataaataaaatgaaatactgagtcttcaaaaggaaggacatgctgatatatgacacaacatagatgaaccttgaggatattatgctaaatgaaataagccagtcacaaaagagcaaataccgtacattctccttctatgaggtacttacagtagccaaattcatagaggcaaaaagtaaaatgttggctaccagaggccaggggaaggaggagaagatggagttatttaatgagcatagagtttgttttgcaagatggaaaagttctggagatggatggtggtgatggttgtaaaatgtgagtgtgctcaaggccacagggatgtacactttaaatgggttaaaatggtaaaattttgttacgcatgttttaccacaataaaaagaaagtggggaggctgggtgcagtggctcatgcctgtattcccagcactttgggaggccgaggcaggtggatcacctgaggtcaggagtttgagaccagcctgaccaacgtggaaaaatcctgtctttattaaaaatacaaaaaattagccgggcgtggtggtggtgcatgcctggaatcccagctactcgggaggctgaggcaggagaatcgcttgaacccaggaggcagaggttgcagcaggcagagatcataccattgcactccagcctgggcaacaggagtgaaactccatctcaaaaaaagtgtggaaagaaaaataacaaacaggaaaatctgggaagtcatttagtctgtcatctgtaaagtggtaatgattaaggactatctattgcacctgggtgcaatagacgtgataaaatataaaagcagcttgaggaaccaaagaacctattctccagctaccttaattatgttcatgagatgtccatttccacccccagcaggaacattaacatttttctcctaacggttttccctccactaaaaatacaggtcagtagaaaagagggagaaggaagtgctgatagagaacgggtactgagctgcccagcacagtggtttacgcctgtaatcccagcacctcgggaggccaagtcaggaggatcgcttgagcccaggagttagagaccagcttgggcaacatagagagaccctacctctactatctatctatctatctatctatctatctatctatctatctatctatctatctatatctatctagaattattattattattattttttaattatctgggcgtggcgactcatgcctgtggtcccagctactcaggaggctggggaaggaagaccacttgatcctgggaggttgaggccgcagtgagccgcgatcacaccactacactctagtctgggtgacacagcaaggcactgtctgaaaaactttttttttttaatcacaaaaaaagaggtactaagctataaaaagtctaagttacaagtaaagaatcttaatgacagaattgaaggagattattcacccaagagctattaatacattgacaggtgcttaccacaagctgaatattttatatgttatttcaattcttgcaaaatctgaggttgatgctataagacccttcttgtaatgggaaaattggcctaaagggtacaagtaactgcttccaagctaagaagctgtcactctggctgccttcaccctgggaatccttttccacccaagttcattattcctggaattccatctgtctcttcttcagtccaaggatctcctgggctgtttcagcactctaccacctctgtctctcataacctgagctgtgcaccaagcttgactcacctcagccacacattagtcctgggcacatctagccaagcttttaagattgcatggttggccgggtgcagtggctcacgcctgtaatcccagcattttgggaggc[134 bp omitted]gaggcaggagaatcactggaacccaggaggtggaggttgcagtgagctgagattgcaccattgtgctccagcctgggcaacagagcgagactgtcttaaaaaaaaattgcaaggtggtgggtgaggaagtgagtgtcaaaaaagacagcaagcagggtgggtaaaaggagagggaggaaaggtaaatgaagctggagacacaaataatccgtctaccttcctcataagtataggcttgaagttagacaattggtcacaagctaattggtctgtcttggttcacgggcttcataatttggaggcagcctagaaaaaagttcagcagtcaaggtacactggaatcccttctatctcatctcttctcttttcctgaatcaccaattaccccttccaaaccccctccaagacctattatgggcccccccagtcctacaaagtaacattggcctgactgtacagtggatttgaaatcatctgtctactctaaaaaaatgttgctttaagatactttgatgtaattgaattctaggacaaacttagaaattgtagaataacaacaaaaaaaattcctaaattagtaattgagtagactaaatatgattgacttgagtattgattagtaaattgaaaatttagtaattgagaatttgtggatcaagcattaaacagaggatatccctgtgtttttgtctgttttttgagatgaagtctcgctctgtcaccagtctggagtacagtggcgcgatctcagctcactgcagcctctgcctcctgggttcaagcaattctcctgcctcagcctcctgagtagctgggactacaggtgcctgccaccatgcccagctaatttttatatttttagtagagacagggtttcaccatgttggccaggatggtctcaatctcttgaccttgtgatctgcccacctcggcctcctgaagtgctgggattacaggtgtgagccaccatgccaggccatccctggttttttgtttgttgttgttgttttttttctctgagacagagtctcgctctgtcaccaggctggaatgcagtggcatgatctctgctcactgcaacctccacctcccgggttcaagcaattcctctgactcagccttctgagtaagtgggactacaggtgcgcaccaccacacctggctaattttttttttgtattttagtagagacggggtttcaccatgttggccaggatggtctcaatctcctgacctcgtgatctgcctacctcggcctcccagagtgctgggattacaggtgtgagccaccgtgcccagcccatctctgttatttttaaagaaacaatggagaaatcttgggatagtctttatttatcttgtcagattatcagaaataacatggttggccaggtttggtggctcacgcctgtaatcccagcactctgggaggccaaggctggaggatcggttgagctcagaagtttgagaccagcctgggcaacatggcaaaacctcatctctactaaaaaaagttacatggtggcacacacctgtagtcccagctactcgggaggctgaagtggcaggatcccttgagcctgggaggcagaggttgcagtgagccgagatggtgccactgcactccagcctgggtgacagagtgagaccctgtctcaaaataaaatatggcccattttaatagctggtaactgaatatgaatcaatgagatgaagattaaggcaattaacctttgattttatttttaacctttattgccctgacaatattttctaaattagttcacatacgtctcccactctttctatcccagatttcatctacaaagggcagtaaagatatagaaaaaggaagagaatgaagtatttatttcaaggactctgggttttactatgtctaatagtgagaacatggatggatagaaggattatagccttcaacttattgaaagatcccatcaggtgttgtaaagtgggtcagatcttaaaatagaaaagttggatttataggccagtttgacttactatctctgtaatctgttgtaaagcattttcttttggtatctttgcttttaaatcagtaaagtaaggctatcctatcttacagggctttgatggggatttagaccctctaggaaggtgttttataagctatgaaatgctaaatggatctccagctattctgtaagactgcttctgatagcgtctgcttattgaataataaaatagtacaagaaagactcttggtgttagagcgggggagagaaaattacaacttaataagatcttattcttcatagagatttccatccatgacacatcgatttcacatatcctgtgcgggatacagttttatattttcaggtgagtaaagtacattttagaagtgttacacagccacagagctaacaaaggcagaagtgaaagccaaaattgggtctaatttaattacaaattatttctgtcctcatcattttgaagatgaggtaattaggtccagagaggggaagtgactgacccaaaagtaacaaaataaggaattatcctggggtgtaaagacagagtctgtggccggaggcagaccatatttctgtgcaaatggataggacagagtggtggtgagttcatggaggaaggacggaagaccacatcatt[138 bp omitted]ggtgaagccccatctctactaaaaataatacaaaaatcagctgggcatagtggtgtgtgcctgtaatcccagctactcgggaggctgaggaaggagaatcacttgaacccgggaggtggaggttgcagtgagccaagattgcaccactgcactccagcctggcaacagagcgagactctgtctcaaaaaagaaaacaacaaaactatttcagatggataaaataagcgaaagggaggtggtccttacgatggttttgtattaacctgaatattattcctgtaaacagggtcccattctacctccatgtcctgcacatctgcagaatagagaaggaagacttttactttctggagaaaatttatttcaagtctccttgagcagcaatcttaagtctcaacccatagcatccaatcctttgtgtattagagggtttacctctcttgtcctgcagctaactcaggttgacactttctatgcctcagagcctttatttttgtcttatcagggtacaggtgctggtagatgtggcagtgggtacttgtggaagatctggattcttatttcttcaagaaatatgtaaaatcaactgagcatgaaaatggagaactgttgaggacaatggaagttgagtagaacgggttaaagcagtatgttacagtatcatgtgcaacagtaccataagcaacggtaagaaaactcttaggattagccataaatttaagcagggttgaacatccttcagcatgttcagctatctggatacaagtgtggaatacgtagaacattggaaaaaggcttgtggttttaagtgcataggacaaagtgagaggggcaggcagagcatggaagatgtttagacaaatttgaggggctgtttggagtaccgtcagctaaatagataaactctaagcagggtgaagtatagcaaaaaggcagctgtcttcaggaactgagaagggtttggggtgttattctacttatgagccaaaaagcctgttcctgtttcatggaagctagcagaagatatgagactcctggcccagaaacaaataattttatcatccatgacaaaagcatgagtcagtatttcttgttgcttttaatcagttcctcatacttcccaagtctcacagctttgggtgccataaagggtccatgatagatgactgtacctgctgtagactggattaagagaagcatgctgagcttagggaatctgccgattttcaataagcagaacaagcctgctttttgtctggggtagaaagttaccttatccctcaagtttgctcagtgcaaacacaacctggcaaaagtccttggcaaaaaaacaaaaattaaaaaaaagaaatttaaaagtcagggtccaacattttatgcatacccataaagaatgtacaggggtgcttagggcccatgataaacagcctcttgctatagtatatcagtgagaatggaatctacagattaatctctggttagagtcagtcaggaagatatgaagtggttgttgaagaggcaaatgccaattaaaagtgaaactactaggccaggcatggtggctcacgcctgtaaacccagcagtttgggaagccgaggcgggtagatcacaaggtcaagagatcgagaccattttggccaacagggtgaaaccccatctctactaaaaatacaaaaagtagccgggtgtggtggcgcatgcctgtagtcccagctactcgggaggctgaggcaggagaattgcttgaactcaggaggcggaggttgcagtgagccgagatcgcaccactgcactccagcctgagcgacagagcgagagtgtcttaaaaaaaaaaaaaaaaaaaaaaaaaaactacaaaatagttggaatttctggagtttgagcatgaaggaggcttagatacggcagaagatactgtcgttgaagatgcagtcacacagggatgtccgatcttttggtttccctgggccacgttggaagaattgtcttgggccacacactaatgctggctgatgagctaaaaaaaaaaaaaaaaacaaaaacaaaacaaacaaaaaaaaagtctatgcatacgaaagtttatgaatttgtgttgggacctcattaaaagtgggcccaggctgtgggttggacaagcatggagattaaaattaggtgtaaggaatataggctgaacatcccaaatccaaaaatccagaatctagaatgttccttttgaacgctgagacgatgctcataggaaatgtttactggaacgtttccgaattcagaattttagattttgtgtgtccagccagtaagtataatgcaaatattccaaagtctgaaaaaaatgcaaagtccatgcatttcggataagggatactcaacttgtaccaccggaggggctgacggggggccaggagctaaagtcttttaactgaagtctaatttggcagtccggaagtggctcgaagaacaaggggtctaaatctaaagacacgaggatagaggctgagagggagacagaggggtgaagagaatggtcgcagagcagaaggtgaggaagagaccacccacccgattaactgctaggctcccgagacaagacaaccacgcccgaaagagctgcaagagaagcaatgtcctcagaggagatgcaggtttcagagagagggagattaaagggaccgtttcaacctattctctaaatataggtttgctggtttccaaagagcacagtgagaaggtttcgggtgaagaagggcaggagatggaataaactcagaaaagtacatcgtaatgaagagtgggagataggaatcaatccaggccaggtgcggtggctcacacctgtaatcccaacacttcgggaggccgaggcaggtggatcacttgaggccaggagttcaaaaccggcctggaaaacatggtgaaaccccatgtctactaaaaatacaaaagttagccaggcctggtggtacatgcctgtaatcccagctacttgggaggctgaggcagaagaaccacttgaactcgagaggtggaggttgcagtgagctgagatggtgccactacgctccagcctgggtgacagagtgagaccctgtctcaaaaaaaaaaaaaatcaatgcagagtctaatatttcttgggggagtcaatataagtgaagataaaggcatattaggagttctggatgtctatgtggtttaatcacagtataataattatggaattataaacacatcgatcccacttctcaatccatgagaaatgaggctttggactttcctgaggtatttttatatgctttgctttattgaattctctcaacacctccaagaattaaaaacattacaccaaggaggacatagacaagactgaaggcacagccaacttatgatcttggtaccagacacagtattacactaggattccagacctgggcgtgcaatgggcggcctccaacaaccgtgacaaagcctcctgcagggaacagctcatttgtccccacaaatggtgacattggagcgacacacaggccaggatgtcctggtggctttcccccaagatccatggtcaagccacgtggcatctaatccgtgggatcaccaccaccacttgtcttcaaggtcattaaaatcccacgcacacttgagtttcagacagagctccttctgtgaggtctgtatctcctctctcactacattgtgcaggtctttttgaagcctgcaaaataagaagtactgaagtttagaagcagtgaagaagtttagaagtaatttttaatttttaaggttcaggggaacacgtacaggtttgttacatgggtctactgtgtggcatgaagtttggtgtgtgaatgatcccatcacccaggtagtgagtatagcacctgaaagtactttaacccttgcctccttcctactctcctcctcctagtagtcccgtgtcttgtcaacaaatatatgtgtatatatgtatatacacacacatacacacacacatattcatatacatacacacatacacatatacgtattgtttgagacgcagtgtcactttgtcacccaggctggagtgcagtggcgtgatctcggctcactgcaccctccacctcctgggccccagcgattctcctgccttaggctcctgaatagctgggattataggcgcacaccaccacgccggctaatttttgtatttttagtagagatggggtttcaccatgttggccaggctggtctcgaactcctgacctcaggtgatctgcccacctcggcctcccaaagtgctggaattagaggcatgagccaccatgcctggcctactgtcaccatctttaaatccacatgtactgattgtttagctccaacttgtgagaacatgtggtatgtggttttctgttcctgcattagttcacttaggctaatagccctcagctgcgtccatgttgccacaaaggacatggtttcattcctttttagagcagtgtagtactccatggtgtatgtggaccacatgcatgtgtgtgttcctcacagcactgttcacaatagcattgacatggaaccaacctaggtgctcatcaacagcagactggatggaagcagtgaagtacaggcagggtgcagtgtaaagtggcaaactgatataaagcataataaaggtttagacaaaagtaattgccatttttgccattaaaagtaatggcggccaggcatggtggctcacacctgtaatcccagcactttgggaggctgaggcaggtgaattacctgaggtcggcagttctagaccagcctgaccaacatggagaaaccccatctctactaaaaataccaagttagctgggtgtggtggcacgtgcctgtaatccaggctactcgggaggctgaggcaagagaatcgcttgaacctgggaggcggagggtgcggtgagccgagatcacgccattgcactcctgtgtgggcaacaagagtgaaactccatctcaaaaaaaaagtaatggcaaaaaccattactttaaaaccactgcattaaaagtaatagcaaacacaattactttggcacctacctacagaaagactaacaaatgaagggtaacttttgtttacccttcgactgggacctcccaccaccctagccttacccacagatgtcagggagaagatttgatggcacgggaacccctttccatagagaaaaggcacaaccacaaaggtagaggatgagaaaaccatggcgcagatgacacaagggaccttgtgggcaggccagagtaactcaggccattttcactgtgtatgaataaatccaagtacttctcattaatctgcatctagcaatttttgaaaaataaaatctgagcgttctacaagaggaggcgagggtctgggcacccagtcagaagccccttctgcacacatgcatgatagacagcagagaagcttcatctttaacggttgctgtcccagaaccctttttaaaatgcaccactgaagtgtgaagttggcaacatcaaatctttaaaaggtgcagatcgtgactcacttcctaaagtaggcaaggttccttggcatctgggatgacttctgctgagatgtaccagtaacagctgttaactgcttacctttctccatgccccaactttttttttttttttttttttgagacagggtcttgctctgttacccaggctggagtgcatgatcatggctcactacagcctcaaactcctgggttcaggcagtcttcccacctcagcctcccaagttgctgggaacacaggtgtgtgccaccatgccaagccaattttttaaaatttttgtagagacaggatctgcctatgttgcccatgctggtcttgaactcctggcctcaagtgatcctcctgccttggcctctcaaagtgctggaattataggcatgagcaactgcagccaacctgcttacctttctgatttcctctcagaatactgaatggggtggaaagtgttctaattaaatgctcttctctcagtgcctcaaaggggcaacataaagcttggtgcaacctcagggcctttgcacatgctactgaaacatcctcagtacattccacccttcatctctagtcacctctcatgttcccttcctgatatagggactcctccttccagcctccttgggactcaggatcaatggtaccgcctctggcaagccccttgctattctggtcaccctcctgtcttatctcaacccagagtttctttcacagcattcatgacaacagagattgcttttatgtctcagacctgttatctcctggaggagaactcaagactctcaaggacaaggctcatgtccgtttgtttcccccctgtctaccatgccatggtgcttggcccagagtcggtattgaaaaagaagccacaagttaatggctatggagtgacacgtacagtaggtacaagaatgataaacagaagcaggctctcaaaatacccaaaagtctccaggactgcaccatccagtacggtagtcattagcgacatgtggctgttaagatttaattagtaggttgatgcaaaagtaattgccatttttgccactaaaagtgacagcaaaaaccattactttaaaaccactgcattaaaagtaatagcaaacaccaaaattactttgtaccaacctaataaaattaaaaatttatatttatattaaaataggctggtggccaggagcagtggctcacgcctgtaatcgcagcactttgggaggcgggccaacatggtgaaacccccgtgtctactaaaagtatgttaaaaaaaaaaaaaagaaagaaaagaaaaagaaaattagccaggcgtagtggcatgcacctgtagtcccagctactgggaaggctgagccaagagaatcacttgaaccaggatggggaggttgtagtgaactgagattgcgccactgcactccagcctgggtgacagagcaagactccatctcaaaaaagaaaagaaaaaacagtccgggcatggtggctcatgcctgtaatcccagcactttgagacgccgaggtgggtggatcacctgaggtcaggagttcaagaccagcctggccactacggtgaaacccccatctctacaaaaatacaaaaattagctgggcgtggtggtgggtgcctgtagctccagctactcgggaggctgaggcaggaaaattgcttaaacccgggaggtggaggttgcagtgaatcaagatgacacaactgcactctagcctgggtgacagagcgagacactgtctcaaaaaaggtgaaagaaaaaagaaaactactaattcagttcccagtcacactaaccatgtttcaagtgcccaatgatgagatgccgctcgtggctacacagcaggtgcacagcacagagatcactcccacccttactggaagttccgttggcctgcatggcctgaggaagccgagtgcaatggaaacctgacacatgctctagaagcctagtcaatctagccttgtccctgtatgttctcccctgcagaaaagtcagtgaggtttacccgagtttctgcagcctgcatgtcgactttttcaaagccttacatagcatcttgacaccatcagtatccaattcattgcctagaaggttcagattgaccaggctcttactgctgctgagaacagagaagagatgctggcagcaagcagttgtcagattgcatttcgccaacctaggggcgggtgggaagaaagcacaacagatagtcctctgagactgggaagttagaaaagagataccacatctgcaggaaaaa[141 bp omitted]aaaccccatttctattaaaatacaaaaattagccaggcatgttggcatgcatctgtagttccaggtactcaggaggctgaggcaggagaatcgcttgaacccgggaggtggaggttgcagtgagccgagatcacaccactgcactccagcctggcgacagcaagattctgtctcaaaaaaaaaaaaaaaaagggctgggcgcggtggctcacacctgtaatcccagcacttagggaggctgaggtgggtggatcacaaggtcaggagttcaacaccagcctcgacaagatggtgaaaccctgtctctactacaaaaaatacaaaaattagccaggcgtggtggtgggtgtctgtaatcccagctgcttgggaggctgag[132 bp omitted]tggagtacttactgcatgccgggcaccttttaaatactgacatataactcatctaacccatctatcaatcttatcaaaggtacatactattttaaactgtatttgatggaggaggaaacaaaaacttaacctgccagaatgtgaaacaaaccattttagtatacaagggatatgagtttattagatctttgaaagaactgaaatagcactattattccttatttacacttttttccatcttattctaaattcaacaatacaaaatttgaacatagggttggctagctactagaaacacaaagacaaaagtgagaaaatacattagatcagtttaacacatcagagatctccacctgagttcataaataactattacacgctggccaggcgcagtggctcatgtcagtaatcccaacactttgggagactgaggcaggcagatcacttgagcttaggagtttgagaccagactgggcaacatggtgaaacctcatttccataataaatacaaaaaaacagatgggtgtggtagcgtgcacctgttgtcccagctactcaggaggctgaggaggaaggattgcttgaggttgcactgagctgagatcgcaccactgcactccagcctgggtgacagagtgagaccccatcaaaacaaacaaaaaaccataaagcccttcttttagaaagaaaaaagtcagaatgagtctctctaaggaaatagttcagtaagttgcttcgttaactgatttttttgaagataaacttgattcagaatgcatttatgccaaactatcttaaatttggcactgcagataacgttaacctattcatgtttctttcaggcctatgagagaacaagtctagtttatgtttaaaccaataatttaatgtgtggtgtctatatagtagatttaacaatctctgaatagaggtttgaggtggctggtaaaccccaacaatgctggaggtggtttacaatttgagtcggttcatttgatactaacaaatcctaacactgtttctgaaaacatcactgagctaatggaaccattccctacatgagaaattgctatcatgtaagccacatttagcaaaaaatcctacggttcagagcaactcatcttagtctgcttagtacacgttgcatgatggttaacaacggtgaagtgaagattcacagtggggagcaggctgcgctcccctcaacttcccagcacctggcacccaccatgggcagattgggagagacaatattttcaatgtaccaaggatggtggtaacaagagtaaaacacttctctaaacgtgaaaaacttcaagcttatcatctagcaggagagtttttgtttttgtttttgttttttttttttttgagatggagtttcgctcttgtctcccaggctggagtgcaatggcacaatctcagctcactgcaacctctacctcccgggttcaagcgattctcctgcctcagcctcctgagtagctgggactacagatgcccacctatacacccagctaattttcgtatttttagtagagatggggtttccccatgttggccaggcttgtcttgagctcctgacctcaggtgatccgcccacctcgacctccccaaatgctgggattacaggtgtgagccactgctcccagctaatttttgtatttttagtagagacggggtttccccatgttggtcaggctgctctcgaactcctgacctcaggtgatccacccaccttggcctcccaaagtgctggggttacgggcgtgagccaccacacctgggtgagatttcttagatggcttgtccttactttgcctcactttctaacccccgatgggatccgatcatatctccccacccgcaagagtagagaaggaagactctgcaaggagaacagcatcaactcacccaagtgtgtgcaatgcacgatgtggtttcagagcctcacacagtagcttcactccatcatcctgaagatcattttctcccaaatccaagattttcacattatgattatggctgagggcattagccagctctccacagccctctcttgtgaaagaacaacctgacaaactgcaaaataaaaacatacaaaaggggggaaagtaattgcgtcccgaagctgtgctgtgtttacaactgcccatctcacgtccaaggaaaggagacaccctgaagccagacttttgtcccaagcctcgaaggaggagggtgcgagtcaggagggccgagacacctccaggtgctctatttacctgagatagaaagccgagggcacagcaacacagccctctccctcccacgccccccgcaggtgcatgaacgtgaagggcctctctgtggtggttaccccccagcacccagagttggcttggctatcacagtgcacgattctcagccttcaagctcgacagttgagctgaagataccaggaatctcccataacggcaggtctgaatttcccagaataaattactataccataataagttcaaaatagttaatccaggtgactatttggagaaaatatgggttgaggtggggagggatgaggagaggaaagacaaggaagcgacaggaggagaaagagtcat[138 bp omitted]tggtgaaaccccatctctactaaaaatacaagaattatccaggcgtggtggcgggtgcctgcaatcccagctacttgggaggctgaggcaggagaatagcttaaacccgggaggtggaggttgcagtgagccgagattgcaccattgtactccagcctgggcgacagagcaagagtctgtttaaaaaaaattttgactacgtgaagaacgtccatatggctaacccatcaaaggccaagtgtaagagaactgccaggctgataaatgatacatgcaaatcaaagacagtcagatttccctagagtttagacatggtggtcaaagggtacaaaaatctcagcaggaatataattgttgtttttttttttttttgagatctattccatggcatggcaaacatacttaatagaacattgtacctttcaaaattgctaacataataaatttcaaatattgtcaccacaaaaaattgttaagtatttgaggtgatggacacattaactaacttaattattccacattgtattcataaagtttgtacccccaaaacatatacagatggtaaatttacaataaaacgattaaagttttaaaaacaagaaagaattccctacaagtgacgaggggaaaaacaaaatgaaacaggttaaaaaaaaaatcagcaaattttatcaacaggtttttttaatctggaagtttttatcaatggttgtcagcatttgaaaacatactcaacttcattcttataaatgcagatgcaaatataaaactactttgtgtttacaaaggaagaggtatgacccacgggatgggcctcaaaataatcttagagggagaaattagttcaacca[140 bp omitted]ggtgaaaccccatctgtactaaaaaaaaaatacaaaaaattagccgggcatggtggcgggcacccgtagtcccagctacacgggaggctgagacaggagaatgacgtgaacccaggaggctgagcttgcagtgagctgagatcacaccactgcactccagcctgagtgacagaacaagactccatcttaaaaaaaaaaaaaaaatctagaaccaggaatcccatttgacccagcaatcccattactgagtgttggtgaagctttagatgaaaggagataggccataaatcaataattgttgaagttcgagcatggattgtaatatatgctcttctctctaaagtttcaaaatcccctggaagaataacaaatcccttgaccggccaggcacagtggctcacgtcttggtacatgctagaccgcacataaccagcactcagtaaaaactctgggctcagggtctctaatgggctgccctggtagaccacacttggcatgattgccacagctggtggctggaggaattgtgtgtcctgtgtgatgttggagagcaagcttggagtcttaaggaaaagacgagcactcagacaaaagatttctcagcaaagcaaatttacctctgcacagaggagtgcttctctttggcccgtcgccacgagagcacatagaacaaaggagaatgaaagtttttatccctgatgcaaatcctgaccccgtgccctttccccattggctggggtcggaccacacaatctcaactagacctgattggctaaacgtttgaactttttcttagataatgtgggcacttaagggagagaagggagagtaagggagagaggggagagggggaaaagtcgtctgcgatgagctggagagctagttttcttcccaaataaggaaaggaaggtgagctaatactgataagccactggtgctgttagcatgcctgggcacgtagtaaaggcagaaagaaagagaaggaaagggaaggggagcggtactgtggattgaagaagaaaggattgatcaggctatttgaagagaaaccttgtcatatcccacatgtgattgcacggggagagggctcctgggagcttatgtctggtttcctctggactctgtcccaagcccctttccctttgctgatctgccttgtgtcctttcaccctgatgaagtgtagcatgaatacgactatgggctggatcccgagtcctcccagtgaaacatcaaacccgggggctggtctcgaggtcccccagacacacacacattcacggtcctcccactttccccatcccacacccccgacaaaaccagaagctcctccatggcaaagagcttgtccacgcctcattcaaaccccatcaggaactcaggcattggtgggtcaattcccatggctctcctccatctgccaactcagagggagccaagaaaacttacttcaggctctgcaggttaccatctgggcgacccaaggcctcacacaggaacttgactccctcgtctctcaggctgttcttgctcagattcaggtgtgtcaggctcctgttctgcaggagagcatctgacaagtgcttgcaagcgggtgctgccagctggcaaaaccagagcctgcagggtgaaagccacagagatggacactcagggaagcagcccagacccaggctcctggaacagagcctcagggccccctccgagcctacacatgcagcagctccctggacgacaaggtctttctttttagctggacaccgacccaggctatggcagtatcttgcataccataaccctccctcgatccagatttctacagtgagtacaccaagtctgtggttctcattagtgactggtttaggaaaaaataaagaaaaaaaaaactttcaaggctccaaggctctggagccagttgggcgtgggtccaaatgggcttgtctgtcagcagctgggtgaccctcaacaagctcccgcactcctttcagccttcattgccttccattctgaagtgcagtaggatggtctggcagagagctgccagtgagcccacgagcagtgcatgtgcttgggacagcacttggcaaacaggcagtgtacaggttatagaagattattatatcacaaatagagatggcatatattagatatgcatgtattgcataatatgtgttaacatataagttttatgaaaatatatgtagttacataatagtatatcgttaatatattaaatattaactatatattacatacatatattgcataatacatatatcataatgtaaatatataatgaaatatatgttacaattatacatgtatatatgtataattacaatcaattacattataaattataacaactaattgttataatatataaataactgtaatattagtcataattatataattacaattataattggttaaaattacaacctatatgtatatgatgttacaatgtgtagaattataacagttataattatactaattattagggctataatagagttgtaataatatattagggttgtaatactaattataattagttataatggtgttacaattctacacattgtatcatgatcatacacgtataattacacacgtatgattaactcacattatgtgtgtgaatcacctatcgataatcccattcttggagactcagtgccgaatgagcagtgaactggcaaaggagcagagggccagagtctgtggttctccgggataatcaacttggtgacacctaaaggtccttggccttttctgtgctttttatactcacctgacaattgtccagtctcaggaaaacccacctttccctctattccacacctgcaccagagcagcacgatgcagctagagaagaggagacctaaagaatctctttgtgcgtccaccactgtacggggtctctcattcccacaaggcaatcttctagattcccgcagtcctgcctacaacggctcacgtaacatctctgaatggcatctcaagctcctatacccccaacccaaactcttcttacccagaccctgctctgcccccaatcttccctgcattggagaatggtcccaccctttacctagctgccaacctcaccctctgggaggtgttcttggtaccctccctcctaaaccacctcgaatccattggcaaaccccattggctctaccttccgatctatcctgaaatcctataacctccccatgggccactccctcctggtcaataggagccctatctcttgctcatactggtatttttgtccggactgtagtccacctgtccacagcagcctgcatgatctttcaaagtacgtcagattaaggtaacatcccacttccaatccaaggatgactttccatctcactcaagacaaaacagattcctacacagcccagcatatcccaggcactgccatctcctaccactatcaccctcactctactccaaccatgctagcttcctcattgttcctccaacatgctgtgcttattccaaccttttgagatggagtctcactctgtcatccgggctggagtgtagtggcacgatctcagctcactgaaaccttcacctcctgggttctagcgattctcctgcctctgcctcctgagtggctgggattataggcaccatgcccgactaattttttgtgtatctttagtagagatggggttttgccatgttggtcaggctggtctcaaaattcctgacctcgtgatctgcccgcctcagcctcccaaagtgctgggattacaggtgtgagccaccttgcccagcccaacctcaggcctttcactctgctgttccttctccgcatacggctgcctcccccttgcttcatctgagtctctatttaagtatcacctgttcaaataggttagtgagagaagaccctgctgggaaatcaaccccatccctgtcattctactctcgttctactttgtttttcttcatatctattgttttgtttttatatgtcactcataaaactataccttccacatgggcaggaagtaaatctgtcatatctaccaccccagccttgaggccttgttctatctctgctagaagctcacatatgagttgaccaaaaaattcattacttcctggggtcctcgtggaaattaagtttcttggcaaaagctccagagacgggatcaacaaatccaggatgctactctgaatctgttttagagcaattcctggcacatagtaattactcaatgaatgttactttttaataatataaatagatatcaaatgaagaaaccattgttctagatatctgtgcccatagagtcatatctagaaatggaagtagggaaaacttactccagtctctctaaggcacacttggggtgagtcagggccgcacacaatagctttatgccatcatcttggagccgattaaatcccaggcacaatcgagttacgtgttggatgctggtgagaaacaaggctaggtcctgacagctggctgccgacaagttgcatttctccaggctgtggaaggtgcaggtgcaaggtgagcctcagccatgatgcccaggttcctctacctttctctctcaaccccttaacccccgagacccaaacattatgggaagattaaattggagaaagaacaaaagcttaaagaaggagaaaaagggccaggcgcagtggctgacgcctgtaatcccagcagtttgggaggccaaggcgggtggatcacctgaggtcaagagttcgagagcagcctggccaacatggagaaacctcatctccactaaagaaaatacatatatatatacatacatatatatacacgtatatatacacacacatatatatgtatatatatacatatatacacacatatatacatatatatatacacacatatatacatatatatctgggcatggtggtgtgcacctgtagtcccagctactcagaaaggctgaggcaggagaattgcttgaacccaagaggcagaggttgtggtgagccaagagtgcgccactgtactccagcctgggtgacagagggagactccatctcaaagagaaaaaggtgaggcaaggtagggttttctcagccctattgaggtgtgggctggattgcacttagttgcagaatgagaggactgccctgtgcattacaggatgtcaataataactgacctttacccactaggtgttacccactagtagcaacccctacaccatcaggacaaccaaatatgttgtccaggcattgccaaatgtcccctgggggacaaaaatcaaatcatccccagtttcaactaatttaatagaatccagttgaaaacccctggatttggggagaatcaaagaagcctaaggaaattatgcaaagaaaggctgccgtgtgagatagccatgatcaaagtgaggggaaaactggctggaactgagacctaaggtggtaggaagaaagaagaggccaggcgtggtggctcacgcctggaatcccagcaccttgggaggccaaggcgagtggatcacctgagttcaggagttcgagaccagcctgtccaacatggtgaaaccccatctgtactaaaattacaaaaattagctagggatggtggtgtgtgactgtaattccagctattctggaggctgaggcaggagaattgcttgaacccaggaggtggaggttacagtgagccgagatcgtgccaccatactccagcctgggtgacagagtgagactccatctcaaaaaaaaaaaaaaaaagacagatgatagacagacagacagaaagaaagacagaaagatagaaaataagtatgtcaatgtgataagtaaatgcagtagggggatccctaaggttccccaaaacctacccactgccacccccactgtgccactccagcttgcaaagaagatgctttgagaaggccgcaagacttacgacagctccttcaggggacacgttggtagcgtggaggactccctcaggcttctcacatcagagagatcattgtctcccaggctgaggaagttgagacttgtgttctcagtgagtttgagaaagagctgacaaatctggtaggtaaggccacaggactccaacctatcacagaggccccgagacagaccgttactctttgaaagagtgatctgtgtttacagacccccccctgctccatgaatgaaagctgactttctccctcttccccatccctttcagaggttggatggcccgcatgtcaacgctactcaaagcatggtccatgatccagcaagagcagcatgacgtggtagcctgttagaagtgctcattcttaggtcccaccccaaatgtgcaggatctctgcagttgagttcctgggatctgtattattatttttttttttgagttagagtcttgctctgttgcccaggctggagtgcagtgtcacaatcttggctcactgcaacctccgctcccgggttcaagcgagtctcctgcctcaacctcctgagtagctgagattacaggcatgtgccaccacacccggctaatttttgtattttttagtagagacggggtttcaccgtgttggtcaggctggtctcgaactcctgacctcatgatttgccccactccaccacccaaagtgccgggattacaggcatgagccaccacacctggcctggaatctgtattttaaaacacccactaggttgggccgggcacattgactcacgcctgtaatcccagcactcaagaggccgaggcaagcagattgcttgagtccaggagttcaagaccagcctgggaaacatggcaaaaccccatttctacaaaaagtacaaaaattcactgggtgtggtggcacacacctgtgggtaccagccactcgggggctgcagtgggaggactgcttgagccaaggaggcagtggttgcagcaagcagagatcacgtcattgcactccagcccggggaacagagtgagaccctgtctcaaaaacaaaacaaaataaaaaataacctcccccaaggtgaggctaatatacattaaaatttgagaaccacggctctacacataggaacattctcctttgctcatccttctctgtctccttttgctacaaggctgagtgctgtcagccctcccagtggatcgtggaagctactggtggtcttgcaaccccccttgacagatctagggagccaaagacttaccacagatacttgaggttgcaagctgagtgtctcaaagctttaagaatcagggggacagtcattcccagcttgttagagctgaagttcagatgggtcagcttgctgttaccctgaagggcaataatgaggtcctgcagaacccactcaggagttaccgatttgcacctgaggaagggaagggacatgaaagctggattgggggagaagactggtttccaggatcccgtctgcctcctcaccctgccttctactacactcactgccaaggttatacacggtacacaaggaattaaaaacaagggctgagccatggtactggaccttgaaaataaaaactaaaatatactccccccaaaaaaatcagtaaactcagttgcaggtacgaagtcagggatccctccttccctctccacctctcctagagacctgccatgaagaggtcctggggccacctattcttctaggaaatgacccccccatatacacatacaatccaacctagaaaagcccagcaataactctcttgcattttctgaacttctttctccttatcttgagaactaagtacgaccaaaagtttaatattaaaagaaaaatttaaaaagaagactgcccaatcccattactgggtatatgcccaaaggaacgtaaatcgttctattataaagacatatgcacacgtacgttcattgcagcactattcacaatagcaaagacaggaaatcaacctaaattctcatcaatgatggaccaaacaaagaaaatgtggcacctatacaccatggaatactatgcagccataaaaaaagaatgagatcatgtcctttacaagaacatggatggagctggaggccatcatccttaggaagctaatgcaggaacagaaaacaaaataccacatgtcctcacttataagtgggagctaaatgatgagaacacatggacacatagtgaggaacactggggcctgttggaaggtgaagagtgggaaaaggcagaggatcaggaaaaataactaatgggtactgggattaatatctgggtgatgaaataatctgtacaacaaaccccatgacacacatttacctagtgacatacacttgtacccctgaacttaaatgtattttaaaaaaataaatgaaggccacagccccctctgcctgcctctcatgagtttggtccagctcacccaatacactgaggtttgaggaaagttacgatcaaacctttcactcttaactggttgaatcaatgcacacatctaggctttagaccttgaaaagtaagacctaatggtgggggaaaagcaaggtagaattcattggcctagacaccagatcattcaaacaaatcccacctcagattcaaagctacgcattactctctcctctatagttcccccccggcttaattgttatacaaggtccacctccatttgctaattccttcctatcttcaagccagatctgagacactgtcattcattcctccttggatcatattagcaggggaccaatacgctttagtccacagctgtgctccagctccagagaggaccctccccctgctcacctttattttaagaggttctatttttaattcacatactttttcccttttctgcagctcatgtttctccctaattcatcccaggacaagcctaggaaaccctggtgttgcctccaagaggaaagacatacacatcaaatgcagcagtatgctgataaatattaccactggatctccaggaaaaaaaaaaaaagtcctaatttatagctttgccaatttctgtggtgtaaattctccaagccaatcatggccaatttcgatctgcccacttgctgtcactaaatggagttacaaagataggtacacacacacaagtggctctcaccaggttgtagcagctggctccaacatgtcactggacagaaatacatgtccagaattggtaatagaaggcctgatggctttgttgatatcatttgaatatactaagtacattctcctcatggtgccttctatctcgttttcttggcttggaatgctctttttccccaggtatccatgggcacagtccctcctccttccctacactgagtcaagtcggtctttacccaaataccttttcagtgaggcccttctgcctttcctacctaaaaaatgcaagccaccttcctcctcatacatcctttctgagcccccagttttctttgggagatgccaccctcttgggtcctattttgatgattttgtttgcttccctgacacaatgtaagatccctgatggcaggagttatctgtgggcttcactgctagaacctcagaactgagaacagaacctggcacacaggagatgtccaatactcactgaatgcaggagtacccatcaaacactacctacttttgcttaagacacgaagcagtctcagactacacgtgtctgtagctcttcttgagtgctttgagtccaccataccctcgaagttttctactccttcaaatccagctcaaaacaggactgaggccctagggaaaaattactttgtccacaggtgcctctaatgcgagatcattcttgatagatcggcattttaaaatttcagcctactttgcccaagtagcagtttcataaatacaagcacagtttattttatcctcctgagcacgtagcttgccttctggcaaatagtcaaccacactcatcaaaagagagaagttgggagattctcctagggtatcttcttgagctgctggcgtctcacacttacgtcagtttctggactttgcatcttggatttttcagtgcaagacagagacccttcacagaggaagcatgaagtttgctgttactcaggtctagctcatgcagattctcatttgtgaccaacgtagagcaaatgctgttccatgcgtgcatcctggaatcaaacttgcttgtccttcatgagggagagacagaacacggataagagcaaattagcctcaagcaatacccagaatacaacctacgggacacagaaagaaaccctaacaaaattattataattttcctaatgtggctgggtgcagtggctcacgcctgtaatcccaccactttgggagaccgtcgggagtttgagaccaccatggccaacatggtgaagccccgtctgtactaaaaatacaaaattagccaggtgtagtggtgcatgcctgtaatcccagctactcaggaggctgaggcaggagaatagcttcaacctgggaacctacatctgtcagggtgtgggggttgcaagaccacccctagcttccatgatccactgggagggctgacagctctcagcattgtagcagatggagacagagaaagatgagcaaaggaaaatgtccctatgttagagccatggttcccaaatattaatgtatatcagcctcaccttgggggaggttattttttattttgttttgtttttgagacagggtcttactctgttgcccaggctggagtgcagtgatgtgatctctgcttgctgcaacttctgcctccttggctcaagcaatcctcccaccgcagccccccagtagctgggaccacaggtgtgtgccaccacacccagctaataaccactcagtcatggacattcagttagatacaagtagatgtcttagcacaatgcctggtacttaaaccctccatattcaatgcctaagatataaagatgtctttaagttgatcaattagattagctaggaaactaggtgatgcctaaaggacaacattctttcaagttagagctgctccagaccatttggtcggaaataagcacgaatacataacgacaacacatccctggttttgcatgaaagaatttgcacagagcctgagaaaacaggagaaagctgagaaagaaatggtttgtaatactcactccagaatttccaagtccctttcaaggatgtgactgctaacagaaagccttagcttatttaaccttttacagtgctttaggcaaaatgaagaagcttggagttcttcgtcctccaaaatattaaggtcaacttcaaagatacgacccaacatcttctttgtgaagtcttcctcctgggactcgtgtaggcagtgaaaaagtcgtagaatgtgaaattggagagaggcactttcagccttacctaactcttctccccactttaataattcctccattaccctgggagatattttacaatgcaaagtatcttccagttctcttgctatgtttttatttaaaagaccaaagaagaacagaaccactggagtccagtaggcttctttgtcaagcaagacgtgttgcagtaacatcttcatctcttgtggctttgtggaatggggagggaattctctaggttcctctagcacaaaggacatggctgcaaaaaactcctggaaacttaggtgggtgaaagtagtgcaacccccacagtcattgatcttttgaagaatattgaactcgtagagagaatcaatgaaaggcacttccaggccctcgatctcagtgtcttctttgttaaacgtgaagttcatagaccacagcccttctatggccagactgcagagggccctccattgtcctggccagctgtcatctgccaaatctacctctgctgtggagaacaagttggagaaaaaataggcatacagactggtggtagtctgagtgattgactggagatcgtaatacctcaccttcggctgcttcagacaggaacatacggtccaacacaccatgggggcactgcaggaatgaaagagagtttcgttttttcttagctgctgcaggattttctcaacttcacttgagtcatcaaagtgtctcatgaaatatacccgtaggtcgtcccctgtgaaccctgtaatttgtacaaagcatggattcactaatgaggccttaagatctctcacaaaccaggtcttgatcgtgatcagtaaggtagccaggggaaccaattctttcttcaacaagctgtgtaggattttggtcactgggagctcctggtaccagtctgtacatggcgagccatcatccaagctctcagagcgtgactcagatatgattatttcctcaaagccatcaataataaacaggagcttctctggttgagacatgaactcttcaatgggggcatcaaaatcgggccaatccaaagaaatcaattcagcaaaggtagtttccttcatgtaccttattttatggcagctgagatagaaaacataggagaacctttgctgaaagagaactccatttgcccagtgcagcatagcctgcattgccaaggtggtcttcccaacccctgccctccccaccaagactatcgtctgggcctgggctctagtcctattaggatccagtaggcgctgcagttcctcatgttcgtcctttgatgtattacggatatatacgtggtctttaggccaactgatgttgtcccatgtctccagtagttcagccttcatgttctctctgtattttcttctgtggtctagagagggcggagtggggagaagaatggtaagaataaatttcagagttaggaatgattcagttacaaagttcctaccccaaagacttgaataagagaaactctgccttccaggattttgtgggaatgcagtggtagaaagttgcaaaaggaggctgaggtaggagaatggcgtgaacccgggaggcggaggttgcagtgagccgagaggcaccactgcactccagcctgggtgacagagtgagactccgtctcaaaaaaaaaaaaaaaaaaaaaaagttgcaaaatatgaagacagttaaataatttgatgatatatacaaatgaaaaatacagaataacataagagcgatcaagaacacctttaagagagggcagagaagggatcatagcgagaagcctctcactagaggattctacactgagaatggagaagaatcatcagaagagaagtcagtctggggtactttcaggcggggggaaggccaaggtgaatgcccacccagaatttttttctgcaagcctcgtgagtgtgcccactccattgcctgaccagctcagcaccccaaagacaccttctagccagtagagggggcccatgagccctcttccctcaccagctatcaggttttcctcacttcctcgaaacacttcagagcaacaagggatttgggcaggtcagagtcccccactcacagaaggctgacccgactcgactcacaagggaatcagtaactgtagagcctgccagttttcctggtccctgtgcccagacagcttcagctggtgagggcttagactctaggttgccctgaagatcaaggctttgtctctcccattctccccattcctgggtttcttcccaaaatgactactgtggggccagtcacagcacaagggccaggacctctacagaggctggggtgaggagtgattgagctagcgattcttagaggccttctggggcctactacgtatgctgagacagaaatgagcattctagagtatagtgaccaaggcacatggtaggaggctggatcgtgattatctttgctttgaaaaccaaggaatgagatgccgtaatttatatttttagaactccaggttttataaagaatagattatgatgcatcagtgtaggaaaggaggtagagaaaacaagtagaaagctactactatcttcatctaagtgaaaatgggcacctggcagactagaatgtatttgtagaatataccccatcagtatatgtaactattacatatctgcaaaaaatttaggaatgaatggtaatcaccattctactttctacttctatgagttcaagattcttagatcccatatattagtgagatggggcagtaattgcctttttgtgcctgacttatctcacttaccataatatcacaaatgatagaatttgtgttgtcacaaatgatagaatttcacaaatgatagaatttccttctctttaaaggctgaatagtattctattgcatctataggccatattttctttatccattcatctgttgatggatacctaggttgatttcatatcttggctattgtgaatagtgctgcaatgaacatgggagtgaaaatctctttgacatactgatttcttcttgccaagtgaaataagccagacacagaaagacaaatgccagatgatttcacttatatgtagaatctaaaaaagtaaaactcagaagaagagaataaagtggtgattactagaagctggggaatggcacggggaaaagagagggaaaggagaaattttgagcaaagggtacaaagtttcaggtagacaagaggaacgagttctgtgatgtactgcatagcaatgtaactgtagttaataacagtgtgttatatagttcaacacttcagaaaaagtagattttaagtgttcttaccacaaagaaaaagtaagtgttgtggattaaggaggttcgagatggctgactggagacattgggtgccagttcttagaaccaaaattacaaataggtaattacagccatgtgcggtggctcatgcctgtaatcccagcactttgggaggccgaagcaggtggatcacctgaggtcaggagttcgagaccagcctgaccaacatggtaaaaccccatctctactaaaaatacaaagattagccaggcatggtggcacgcgcctgtaatcccagctactcgggaggctgaggcaggagaatcacttgaacccgggaggcagaggttgcagcaggccaagatcgcaccactgtactccagcctgggcaacggggcaagactctgtctcaaaaacaaacaaaacaaatagataatcacaattcaaacagagtatcaggagagaatattcgagcccaacagagaactcataggaagaagctggggcacagaaaaaggaagagaagccaactcagccagcagagatcagctaggataggcttgccttgtccagccccacccaacttcactcccacccctccatggctgatcatggagcccaagctcctatgcatttcacagaccagcccattgcctgatgcacaagaaagtttctcctggtaaacaacaatcaagcataaaagctactgcaactgctgcagctggctctaacctgcacgtgtcatctactggactagatgtcaaactacacaacccaatacaaaagctgctaacacaagtaaacagtgcttgggaaccagataagctttaagacctcactaacctggccccacaggagaccaagagcctactcacacacctagtaaaccactactaaaaccacatttagaaagccactgcactaatactgtctataaccaaggaatttatagagtctttgtcaatgaaagcactcagaaaagccaaatgaccctactaaacacacattatagtcacatcctcaagggaaaaaatagtcccatctaaacagcagtaaatgcaaaaataagaagtgatagtttcttcagataagaaactaatgcacaattcttggcatattaaaaaaactcaggtgttatgatacccccaaaggattgtactaactctctagcaatggatcctaaccaaaatgaaaatgtaaaaatgccagataaataatttaaaatattgattttaaagaagctcagtgagatccaagagaaatcataaaacctgtacaaagaaatcagaaaataaattcaggatatgaatgagaaatttatcaaagagatatttttgagagaaaaatcaaataaaacttctgcaagtgaaaaattcattgaagttacaaaatatagctgaaagtttcaacaacagattagacaaagaagaggaaagaatctcagaacttgaaggtcttttgaattaatttagtctgacaaaaataaacaggattttaagaaaatgaacaaagacttcaaaaggcgtgggactacatacaatgttggaacctatgaatcataggcattcctgagggagaagaaagagcaaaaagttttaaaaacctgttgtggaaataattgagaaaaacttccctactctggcaagagatccaggcatccaaatataagaggattaatgaactccaaaaaaaatgcattgcaagaagggcctcactatgatatttattcatcagactaagtttaatgtgaaggaaaaaacgtcctaaaaaaaatcagtaagagaaaataatctagtcacctatgaagcaaaacccatcagactaacagcagacttctcagcagaaatcttacaagctagaaggaattggaatttcaaaggttttttgtttaaagaaataaactgttaaccccaagttttgtatccttctacaataagctttataaatgaagaaataaagtctttttcagacaagcaaacactgagggaatttgtcactactagacttgtactacaggaaatacttgaaggagttctaaacatggaactaaaaaggttgatacttgccatcacaaaaacacacaaaactataaaatacaccagtcttataaagcaattacacaaaggagaaagaaatcaaatgatagcatgacacaattccatcaaatcacaaagaaaaagaacaaaaaaatctgcaaagcaaatggaaatcaacattgtaactggaaaaaaggtcatatatcaatattaaccttcaatatacatggattaaatgcgcttcttaaaagatataaattggaggaatagattttaaaacataagccaaatatatgctgcttaaaaaaaaactcatcttacttcactatagactgaaggtaaaggtgtagaaaaagattccacttttccccctttgcttcacaaaaagcaaactggagtagctatacttatattagttgaaagactttcaaccagcaacagtttaaaaaaaggcaaagaagatttttatataatgataaagggatcaattcaagaagatataataatcctaaacatatatacatccataccagagtacctagattcataaaacaaatattattagacctaaagacagcaaaataataatagtgggagacttcaacaccccactgacagcactagacagatcatcaagacagaaaatcaacaaaggaagtctgaacttaaattggactttagaccaaatgaaactgacacacatttacagaaccttctactcaactgcagaatatatattcttctcatcagtgcatggaacattccttgaaatagaccgtatgttaggctacaaaacaaggctcaataaattttttaaaaatggaaattatatcaagtatttttctcagactacagtgaaataaaactagaaatcaatctcaagagaaactcctgaaactatgcaaatgcacagaaattaaacaactgctcctaaacaatctttaggtcaatgacaaaattaagacagaaattaagttttttgaaactaatgaaaatggagacacaacatatcaaaacctctgtgatacagcaaaaaaaaaaaaaaagtttatagcattaaatgcttacatttaaaaaaaaatcacaaattaacaacctaacaatgcaactcaaggaaaaagaataagaacaaatcaaacccaaagctagaagaaaaataacaaatcagagcagaaatagagaccaaaataacaatacaaagaatcagtaaaaccaaagcttggttactttaaaaaataaacaagattgatagatggctagctatactaactaatgaaagaagagaagattcaaacaaacaatcagaaatgaaaaaggaaacattacaactgagccaacagaaatacagatgatcagagactactatggacaactctatactcacaaactaaaaacccaagaagaaatagataaatttctgggaacatacaacctaccaagattgaatcaggaataaatataaatcctgaacagatcaacaacaaggagtgagtgaatcagtaatttaaaaaattaataacaaaaaaatcccagtaccagatgtatttcacaaccaaattctacaagacatacaaagaagaactggtaccaatcctactgaaactgttgcagaaaaagatgttggagaggagggagtgctctctaattccttttattaagccagtatcatcctgatgccaaagctcaacaaggacacaaaaagacaactgcagaccactatccctgatgaacataagtgcaaaaatcttcaacaaaataccagaaaactgatccaacaacacataaaaaagataatacaccatgaccaagtgggttttaacccaggaatacaaggacggttcaacactcacaaatcaataaatgtgattcgccacataaacagaattaaaaacaaaaactatatgatcatctctacagatgcatagaagcatttggtaaaattcagcatcccttcatgataaaaaccctcaacaaactaagcttcaaaggaacatatgtcaaactaataaaagccatatatgacaaatccacagcccacattatactgaatgggaaacagttgaaagcattctccccaagaactggaacaagacaaggatgcccactttcaccactcctattcaacacaaaactggctagtcatagccagagcaatcaggcaagagaaagaaataaaaaggtatctaaattgtaaagaagaagccaaattatctgttgatatgatcttatatctagaaaactctaaagacttctctaaaagactcctagatttgataaatgaattcataaaatcttagtattaaaataaagcaatgtacaaatatcagtagcctttctatactccataatgatcaagctgagaaccaaattaagaaggcaatctatttacaatagcttaaaaaaaaacacctaaggaatatattcaaccaaagaggtgaaagatctccacaaggaaaactacaaaaagcttaagaaattatggatgacacaagtaatgctcgtggataagaataaatgtcattaagatgaccatattttccaatatatcaattcaatgcaattcctatcaaactcccagtgacatatttcacagaattagagaaaacaatcctaaaattcatatggaaccaagaaagagccctaatagccaaaacaatcagaagcaaaaaggacaaatctgtatgcatcaccttacctgacttcaaattatactaccaggatatagtaaacaaaacagcatggtactagtacaaaaataaacatagatcaatgtaacagaatagagaggccagaaataaagctatatacctacagctagctgatcttccgcaaagtcaataaaaacacgcactagggaaagggcactctattcaataaacggtgctgggaaaactggctagccatatgtagaagaataaaactggaccatatctctcactatattcaaaagctcactcaagatggaatagagatttaaatgtaagacctgaaactgtaaaaatcctagaagaaaatgtagggaaaagttttctggacattgccttggcaaagaattcatgactaagacctcaaaaacaaatgcaagaaaaacaaaaataaactgatatgccttaattaagaagtttctacacagcaaaagaagtaatcaagtgaacagataacctgcaggataggaaaaaatatttgcaaagtatacattcaaagggctaatatccagaacctacaaggaactcaatttaaataaaatcccattagaaaatggagaaaggacataagcagacattttttaaaagaagacatagaagtagtcaagaaacatgtaaaaaaaaaatgctcattatcactaggcagagaaatgcaaattaaagccacagtcaaaaaacccaaatgttggcaaggattcagaaaatggaacacttgtacactgttggtgtgaaagtaaattagtacaatatctatgaaaatattaggatatttctcaaagaactaaaaatagaactaccatttgatcaaacagtatcactattgggtatctattctaagaaaaaaaaatcatatcataaagatacctgcactcctgtgtttattgcagcagtattcacagtagcaaagatacgcaatcaacctaaatgtccattaatggatgactggataaagaaaatgtggtgtatgtatgtatgtatgtatacacatatatacacacccaggaatactactcataaaagataatatatcttacagcaatatggatagaactggaggccattatcttaagtgaagtaagtctgacacagaataacaaataccgcaagttcttacttataagttggaactaaatcatgtgtacatatgtacatatagaatggaataatagacgttgaagactcagaagggtggaaaggtaggagggggttgagggacgagaaattcctttaataggtacaatgtagactattcaggtgatggctccaccaaaagctcagactttaccactacacgatatatccatgtaacaaaatggaatgcaaaccacatattgagtcaagacagtatttctgttaatttggcaaatatttggaagaatttttattgatacttggaaggaaaaagacacccacaatatcataacggatgatattttgttacagccttttagaggatcaatttgactataagctttagattatatatatatgtttttgtctaggagtcctactttaagaatgtcttctacagaaatatttgtggatatgcacatatgatatggacatttatcaaagtattgcttaatgttttttaaaaagctggaagcctagatttctgtcaacaggaaaaggttaaatacaaaccatgacacatccatacaaaggtatatggcaaaagaataataaatattacctgttatgatcccagaaaaagagattaagttaaggatctggagaagaggaacttatcctggattatctggggggctaatacaattgcacatatcatcctaaagtaggagcagagggagatgaggcacagacactcagaggaaaagacatagcaggtggcaatgaggccacagagttggagatgagagtcatgaggccacaacccaagaaatactggaagccaccagagctggaagagaccagaacagatcttccccagagcctttctactgacatgttgatttcagttaattggtatattagtctgttctcacactgctagtaaagacatacccaagagtaggtaatttataaagaaaaataagtttgatggactcacagttccacatggctggggaggcctcgcaatcatggcagaaggcaaagcaggagcaaagacacaacttacctagtgggaggtgagggggcatgtgcaggggaactcccctttataaaaccatcagatctcaggagacttactcactgtcatgagaacagcgagggaaagatccaccccatgaatcagttacctcccaccaggtccctcccatgacacatgggaattatgggagctacaattcaagatgagatttcggtggagacacagccaaaccgtatcatttggcctgtctctcaaagaggttttttttttattgttgttttttgtttttttgtttgtttgttttttcagatggagtcttgctctgtcactaggcttgagtgcagtggcatgatcttggctcactgcaacctctgcctcccaggttcaagcaattctcctgcctcagcctcccaagtagctggagctacaggcacacaccaccatgcccggctaatttttgtatttttagtatagatggggtttcaccatgttggccaggatggtcttgatctcttgacctcgtgatctgcctacctcaacctccccaagtgctgggattaccggcgtgagccatcatgcccagcagagttgttttaagctatccagtttgtcatacaattggttaacagaggccctaggaaactactgtagcatacaaccttcattccaagactcagcatcaatttatatgcccaggatactgaacactgatgctgctacacccaggagaaatgataatgttatgggaggatagaagggaagacagatacctaacaccatgacaagaagtcagtagataaccgattggaaaactaagaaatagcaggaaatattaatcacttatgaccatagaaacaaatatcagaagtagccccaaagagtagtgggtggatgtctctgtagagcagacctcaagagctggctgggaggattgatgctttgcattacaagctctatgtccctgtgattctttggggcttgtatacatgcacatgtacttctttgataaaactaaacttagaactagaatgtatgttttactttctcagagtgacaatctccatagggccactggtacaaaaactacagatgcctattaattcacctgttaaaaggtaatctcaatatcagttatttaacaaaagcaccaagtccagaagcagacaccagtgtgtgagaacctacaggaaaaacagagaatcccgtttatagtaacctatttttctgtaggagatcagtcagggtggtgggagaagttgtaggaaaaatgcaaactttcttggaaggctgggggagagggggttgcaaagctttggggaagaatgagctgaaggcatggttcttaccctggggcaaaggccaagtagtaggtacagaagaatgcagggaagtttatctgaatagcttgtttatcatgcctccagaaacctggcctttcatcacccacgcgcaggagtagggggtggaaggggcaccaccatgtgaattgcccacaagtgtgttgactcaaggcctttgtcattaaatctgttctaaataaatgcccgcagtgccagcttgtcagggcagcagctgctgactctttatagcaccctcctcagtatctgtgggcagcccagtcccctagcctgctctttcactggatatctgtgtctgagtgcattttttcattcgttgttcggccagggtctgcgggttggacctggcatttttcaacaaattgtactggaagaaccagttgggaagagcttttaatttattgcataccataaactgaagaaaatgtcagtatgaggcaactctactatggacctagtgaaaccaatgctcgtcaagcaacctgtccattatcaacataaagtagtatacacacctgcttcctctagcatctctggttcttcttggtttggatcttggcatccctgggcctgtacattccctgaaataaacagtgatgatgagatatgaaaataccccagactgaaaatgggccacaatgataaagactctcagtagaaccaactctttctatggcaaacttgagagtgaagagactggagaaatcagcatgcccagtttatattttttatttatttttaagaaatggagtctcactctgttgcccacgctagagtgcagtggtaccatcttggctcactgcaacatctgcctcctgggttcaagagattctcctgcctcagcctcctgagtagctgggattacaggcacacaccaccaggcctggctgatttttgtatttttagtagagatggagtttcatcatgttggcaaggctggtctcaaactcttgacttcaagtgatctgcccaccttggcctcccaaagtgctggaattgcagatatgagccgttctactcagccgtaagttattatttaataagaaatactggaagaactagatggaaagagtttttaattttttatgtaccataaattcaagaaatttcagcataggcagcaaatgtggaccaatgaaacgagtgttccatcaagcaacctgtcaattatcaaccaagtaatgtacacacctgtttcttcttctagctcgtctagttcttcttggtttggatcttggcatccctgggtctgcatattccctgaaataaacattgacgatgagatatgaaaataccccagagtgaaaatgggccagcaataatggaagcccccagtagaaccaactttttctatggcaaacgggattgaagagactggaggaatcagtatgcccagtttacagtaagttatcatttaataagcaatactgaaagaattagttggaaagtttttaattttttatgcactataaattcaagaaatttcagagtaggcagcggatgtggaccagtgaatgagtgctccatcaagcaacctgtccattatcaacttaaagtagtgtacacacctgctgctgcttctagcatctctagatcttcctgggttggatcttgcagctcttgggtctgcacattctctgaaacaaacagtgatgatgacatatgagaatacccagactgaaaatggaccagcaataatggagtctctcagtagaaccaactccttctatgacaaactggagtttgaaggtctgattcctccagttttctcaagctccattagcccaactgaagatgcagtgtgcactctggaaagtccacagcacacgctaagcacattcctgcctcagggccttggctccagccctccccgctgcctggattcccagacatctgcttagctcactctcaaggctctgctgaaatcttacctccacaatggtgcctgataatcctaatcatgactaccacctatatctttaataacataccttagcctctccccatctgccttatcctccgtttgcacttgtcaccttttaacacaccatgtgatttatgcgttatgtctattgcctgtctagggagatggctagtctgtttacggattcatcccaagtgtgtagaacagtaccccacacagagaagccactctaatatctttggagtagaatactgtaggaataaaagcaccaagaattgggttcaaaccaagtccctcaatttgctgcacatcaccactctgaatgtccccttcctcatgagctagaagacctcttctataactcacagtggccaaactcactttactgtgtagtacatagctgctacaggacaataccttgtaagggatttgcatctagagatatggctctaatatttacaactccattgcttgtcactgtttacatggcttgttctggttagcaagctgtgtcctgcacttcctccagatgttccatgttccttcaaagaacaagaatccatcattctacacccatgttagcctaggccaaataatcccagctctctgaagctccacagaccctacctgtggagtctgagccctacgtccacatatttcaagctgaagtctgtcctgaattctaactctcctggaagcagggagcccgagtgggaaccttttcctagccatagcccaagcagaggaaaagtagacgattttcccctcttcactggctctgtttatccaaaagccaactgtttgacatgtggcattcctctgttgcaaacgaatccaacgatgtgagccttccaggttatagctttactgtcaagtatcaggcatcaccatctggatcttcatagattaaatttaagactccaatttagctgggaccacctgtcagaaaagccaggctattccagatgaacagcctagcaggactagtacatggctgcaaagagaaaacaaaggttaaaaattagtaagttttcacttattctccctcatgcttagggaactttgcaaggacatgaaggaatagcgaagagcgggcatatggaagttccactggtcactcaccaggcctaggcattcctccattctctggtgaggcgcacttatctgagtatgttttaaatgccagaggagcatgttttaggtaaccagcctacccttcctacacccaacattactccccccaggctccataggtttacttagtggtgtctttatcctaatcctagcaacccctcaatgtagggaagcaccggtgatttacacataattatgcacttaagtcaatgtggtccctgttcccattgcatgttaaacctcactgcccatgcggagggtggtgggggaaatcttggccttgtcttaaaggtccccccaaaaaaatgctttactgggaaatgattcctacataatttaaaatgcaatgcatgaagaatatagagtaattttaaacttttatgtatataatgaaataactttgaaaagtatgaattccacccaagcatagccaaatgatttttgacaaagatgcagaagcaattcaatagataaagagctcttttcaacaaatggtgctggagccaatggatatctataggtggaaaaaataagaagaaaaggggtagcaacctaaactttacaccttatacaggagaaaaaaaaaaccaacccaaaagagagaatagatttaagtataaaaggtaaaaaccagcccagcacattggctcacacctgtactcctagcactttgggaggctgaggcaggcagatcaccaggtcaggagtttgggaccagcctggccagcgtggggaaaccccatctctaataacaacacaaaaattagctgggtgtggtggtgggcgcctgtactcccagctatttgggaggctgaggcaggagaatcgcttgaacccggaggcagaggttgcagtgagccgagatcatgccactgcactccagcctgggtggcagagcgaggctccatctaggaaaaaaaaaaaaaaaaagagtgaaaactatatgacacatttgccttcgattattctcctttgcctgtgaaataaagtctaattccttaaaaaaaaaaaaaaatcccagttctggacttccatttgtacacctgtggaagcctgaaatagattcttccactgcaaattcacagacatatccttgggtggggtagagggtgtgtgtgtagtgaggtgacactctcccagctctgatactgctggccaggcaccatgcttaaacaatcatccataaaccaccagggcaagtgacgctttcagataaaaaaaactaccccaaagatcaactaacatgcaagttcctactctgtgcccagtgccttctaagcatttcactctagaaatgtagaggttggaacagtgaccccagtttaagaaagaattgtggccccgtggtaaaaatcacttgtccaaggttaccgttggtcaaatggaactagcctttgaatccagacatcctgactccagaacctgagcccttaagccaatagtccccaaaagacagtacgtgggtccctgtatacacagttgtgtccgcaaactcactctcagatgcatatcccacaacactggtcaagtacagaaatactcatggtacagtttcctagatgatggggctaacagggcactaagaaccacctgatccaactgctgagcttttatcgtcccctgcatggctggtgaggtggatgtggcccagggctttctcctacttgagaggtatcttccccatgacccacgcctttagaaggccaagtaggaacaagacaaggaccagggaaacggggctcctgtgatgtgccccgcctggccctgcagccttcaggcaggaagtttatgccgccattcgaaatcagcaacaagaaacaaaggataaatgcttgacgggagggacaccccatctaccctgatgtggttatgacgcatcacttgcctgtatccaaatatctcatgtaccccataaatatatacacctactaagtatccagaattttttaaatttaagtttaaattttaaaaacatcagtgacaagaaacaggataaatgcttgaggtgatggacacactccatttacccctgtgactattacccaatgcatgccagtatcaaaatatctcatgtaccccataaatatagacacctactatgtatccaaaaacttttaagtttatatttttaaaaatcagcaacaagaaagtaagttcttcctttgagagcattctcctctgtgctaattcctctctccaggtctctataaagagagatattcagttggaaacagaatttaagagttctaaatctctattttcaatctctgatatcctttcttcatgactaaaacaccaaaagcatggcaacaaaagccaaaattgacaaatgggatctaattgaactaaagagcttctgcacagcagaagaaactgtcaccagagtgtacaggcaacctgcagaatgggagaaaatttttgtaatctactcatctgacaaagggctaatatccagaatctacaaacaacttaaatttacaagaaaaaaaaatctcatcaaaaagtgggcgaagtatatgaacagacacttctcaaaagaagacatttatgcagccaacaaacatgaaaaaaagctcatcgtcactggttattagagaaatgcaaatcaaaaccacaatgagataccatctcacgccagttaggatggcgatcattgaaaagtcaggaaacagatgctggagaggatgtggagaaataggaacacttttacactgttggtgggagtgtaaattagttcaaccattgtggaagacagtgtggcgattcctcaaggatctagaactagaaataccatttgacccagcaatcccattactgggtatatacccaaaggattataaatcattctactataaagactcttgcacacatatggttattgcagcactgttcacaatagcaaagacttggaaccaaccgaaatgcccatcaatgatagattggatgaagaaaatgtggcacatatacaccatggaatactatgcagccgtaaaaaaggatgagttcatgtccttcgcagggacatagatgaagctggaaaccatcattctcagcaaactaacacaggaacggaaaaccaaacaccgcatgttctcattcataagtgggagctggacaatgagaacacatggacacagggaggggaacatcacccactgggcctgtcagtgggtggggggctaggggagggatagtattagaagaaatacctaatgtacatgatgggttgatcggtgcagcaaaccacaatggcatgtgtctacctatgtaacaaacctgcacgttgtgcacatgtaccctaaaacttgaagtataataaaaaaatgaaagtagaaagaggaaaataataaagataaaatcagaaatcaatgcaatacaaagcatgcaatagagaaatcaataaagcctaaagttggttctttgaaaaaaaagaaaagaaaagaaattaagacagtaaaaaaaagaattctaaatctcattccctagttttctgctttacatctgcctattccaaacaagagtatctgagggctttaaaaatgagagagggacagggaaaaagggtggagtggtgttctagtctccatctcatcctcctttccaccagaagatacacaaagcccgaacttgtatgactccgcatgccccgtgtccagggttctgatatggaagactcagtattgcccactctccttccttagaactcactcatttgagggtaggagaagctgtacaaggtcaagcacagagcctttggagacacactgcctgggctcatgtcccagctctcctggtcaccagctctgtgactttgggaaatttacttaagctgtctgtgcctcagtttccttctctgtaagatacaagtaataggacctccttcttataaatatagtgaagagtcagtacaaatgtatagacagcattaagataaatgcctggtttatagccaggcatggtggctcacgcctgtaatcccagaattttgggaggctgaggcaggcaaatcacctgaggtcagaagtttgagaccagcctggccaacatggcaaaaccccgtctctactacaaatacaaaaattagccgggcatggtggcaggtgcctgtagtcccagctactcgggaggctgaggcaggagaatcccttgaacccaggaggcggagagtgcagtaagccaagatcacaccattgtactccagcttgggtgacaagaaggaaactccatctcaaaaaaaaaaaaaaaaaaaaagagtcaatgtctggtttataacaggcaccaggaaacatgattattttcaacagctctcataggcagtcagttcttttataaagtgatgtgtgcattctgaaaactcaccacagcagattacatggtgcactaagaccagacggcttacaggagatagaatcagtgattatatatatatatatatatatataaaattttaaccagaagcttaaacagcatggttttatacttgctgattaattacaaaacactttattaccacaataaacactgcacgatcctacaacaccacaatcagccctgtaacacctcagcaggtcttgcaatgccacagaagatgtggcatgaaactttaccctgagtaaaacatgaactttgcttgtgaatatgggaagtgtcgcagcttgtgagtttttgtgaagtgaaagaacaatgatctgaaatcagacagaaagtgtagaatgggcaaggctcgtactgaggaagcgggtagatgtttgaggtacatgcctgtgtgcattgtgtacaatcctacatggctctgctcggctgagtgcagggtcggtgggttgcgggggcagggcgggggttgttgtggtttcttagtgtttctcttgggcaaaaccatgcataagctaacatgaaatctgtgctgcactcaaattgttcccagtacgacaatcacactgggacaaatttgcatgtttaaaagaagcctgggctgggcgcggtggctcacgcctgtaatcccagtgctttgggaggtcg[134 bp omitted]gaggcaggagaatcgcttcaacctgggaggcagaggttacagtgacctcagatcgcaccactgcactccagcctgggcgacagagtggagactcaggctcaaaaaaaaaaaaaaaagaaagaaagaaagaaagaaaaaggcttataacataactgaatgtgcctcttccgattccctttcttgcctttgctactccttcccaggctagagcactaaatctttatagcctttatgcctttaaacatcatactgtcatagattatcaaggaggatttgtagggggagatcggcagtgtggaatgaccccacaaaaacccagcggctacctccttgcctcaggagtaccaagcagccctcccgccttccttcttgaggactctcacctttcatctcggctctaactttctcacacagtgaggtcagattcattgtctggaagatgccgaggaccactttccatgcctgaccttttgggaagtgttcatccaaaagaaaggacagattcaaagggtcggcagctctcaagtttgcccaggggatacgcgggaagtgcccctggggggccgaccagaagtccatcagctgctggggttccaagcaaagcttgaattcctccagctgatactgatccagggccatcaggtaaggcagaagcccttggttggtaccaccgttggggcaggtgattacagaaaagttcatcttgcccaacacatgcagtttctcacttcagcaaaggactcctatatccacaggacacttgtgacctgcagaaaaggagagagttgaaatcataagccataaatatcacctcctctcactgtcttgcctacacatttgagtattttcgcttcacagtacttcctgctacttgtgttagtacacttttttgttgttgttttgttttttgagatggagtctcgctctgtcccccaagctgaagtgcaatggtgcgatctcggctcactgcaagctccgcctcccgggttcacgccattctcctgcctcagcctcttgagtagctgggactacaggtgcccgccaccacgcccagctagttttttttgtatttttagtacagatggggtttcaccgtgttagccaggatggtctcgatctcctgaccttgtgatccgcccgcctcggcctcccaaagtgttgggattacaggcgtgagccaccgggcccggcctcaactgggtattttctctagcaaccttacctagactcgagatcactggctttcatcccatcccagaaggaacaatgccatcagcacctgatttatctgccttactaacagtgacagctgtcctagaaaagttacaggtgcatgatggtacttaccaactcacattcagagggttcacctgaaatgtgaataagaagaacattgaagttaattagtcacagtaaagatcaaagacatttgagagatgggaacgggggaaactaatcagggagaaggggtaacaaagagagaaaatagaagtttccgcccatcacgattttggccaccaggcagctaatggtgattgagacagatctgccactattcccccatagaacctggtccggcatgtatgctgggtcatgtcaaaataccaggtagtattgaaggcaacagatagacagcagaacaaaagacttttttttttgtgatggagtttcgctctcgttgcccaggctggagtgcaatggctggatctcggctcactggagtctttgcctcccaggttcaagtgattctcttgcctcagcgtccgagtagctgggactacaggtgcatactggccttggcctcccaaaatgctgggattacaggcatgagccaccatgcctggcccaaaacactatgcttgaagctactggtgtgtgacccccgaatgtctcccaaagagaaatctccagaagagatgtatgttaggacctaccctggcagcccaaattcattggactactccagaaattgttggagaaaagatggggaaagacacacagaggaaaacttgaaacatcatgaagaaaagccctttcaggtataagcagggaggataaagactaggggaaaagcttatttgagaatcaaatgacattaagctatcattgaacacccagtagaagctgagcaagggggctgggcgcggtggctcacacctgtaatcctagttttaggaggccaaggtgggcagatcacatgaggtcaggagcttgagaccagcctggccaacatggtgaaaccccgtctctaccaaaaatacaaaaattaggtgggcatggtggtgggtgcctgtaatcccagctactcaggaggctgaggcaggagaatagcttgaacctgggaggcagaggttacagtgagccgagatagcaccactgcactctagcctgagcgacaagagcaagactgtctcgaaacaataaaaaaaaaattactccatgctgcacttttgttgtatgtctcttgtttaaatttttaaaccgagaagaactgaggtatcacatcagccaccaacaaactcctccaagattatagggttaggttcccgtgagcctctcgtcacattttcatccactagtcaatacataaccttgttttatatgtgtctctgtttaaggaaacctaatttaatacatatcgttgattcattaacattgagcccaccgccagcaacactatagctcatgcctgaaagaagctcagctaacgcatgcattttcttcagaactcacatcccagccttcttgtgtgtcgagcaccagacagaacttccacactacacaaggggacgtttagacagcaaagtcaccgacgaaaagcccagaaatgcaaaaacagggcactaagtagacccaccagcactgccttatctgacctcagctcgaatttttcctggctctgtgcatgtctggatgactttgaaagctctgcaaatattgatttgggggttgccagcagatcttagcgtgtagatgaattcacacacatggaatccacaaataaagaggatgaactataattaggatgaagcatgttgggtatgagacccacatggtgccatgaagttatacagcaagtaggccaagtacataggactcgaaaggaaattcctccaaacttgatgcatgcatcggattgagccaaggagggtgggaagaggattagggggtagagcggtcagtgaaaacagcaagtgcaaaagccctggagggaaaaaaaatacaagaacagagaaattcagctagaaaatctcacacaactgcggaatccccttggttgaggagatggaaagctcctaatcgaagaaggaagtgtgtgcgatcaacttttgctcctaagaaaacaccagcaggatacagtggagtaaaaggtcccagagaaaggtgaaaccttagagcagagagaggagacgtctcttaccaaccagactttgaatctcacatgagtttccagaggctgattcgggaaaccccatagaagtagtcaccgccaccccctcctcacctgtgagcagccctcgggtccgtctgcctcctcttagctgtgtctcggggcctcctgtttatagctctcttcccgctccctttccccagcacaactcggggtcagttgagaagctgacaagactcagctgagacgtacgatatctggtttttctcctccagatctagataatcacaggattcttcaggctgggaggccaaactgggtttaaagaccatactatcctgaagtaaatggagccatccacgccagcaaagagccacagatgggagtaatgcctgtgattacccctcctaccatctgggcgacctcaggggacaatgaaagaggagagggagacagaggtcgtgagacactaaaatcacggttgccgccacttacaggactgtgtcttcttccaactgcaggagaaatgctccttccaccattccatcatgaatacaaaggattttccaccgaagtcaggaacaagatgaggatagtcataactccgctgctattcaacattctgctggagatgtcaaccaattctatcaacaatgttagctagttttaaactcgggttacaggctttaaactagcaattggaaagcaattagagagaggtataataattggaaagcaacaggtaaaactacatttgcaaacttgattatgtacccggacaatgcaaaagactgcatgggagaactatcaacaacaagagaaattggtattacagcaggtaataaaataagtattcaaaaatcaatagacttcaaatatggaaactcaaaacactggaaaagaatacccctatttactatagcaaaaaaaaaaaaaatggaaataaaatgcttacttaaaaacttcagaaatatccaaaacttatgtaagaaaaactataaaatacatttctgcaagatccaaaagtggacttaagccttaaagaaataaataccacgtttttgcatggaaagctcaacctcataaatatatcacttctctctaatacaaatacatcaaggttttacctggaggtgcggaagtggattataaaattcaactgaacaaatcgaatttgtaggaatggcctggaaaatcctgaaaaggaggaatgaggagggactaaacctagcagatattaaaatataccatgaggcctttatgattaaaatatagtattggcacatgtgcaaacagactgggcaaaggaacagactagaaaatccagaaatagggctgggcgcggtggcttacgccggtaatcccagcactttgggaggctg[133 bp omitted]gaggcaggagaatggtgtgaacctgggaggcggagcttgcagtgagtcgagatggcgccactgcactccagcctgggtgacagagggagactctgtctcaaaaaaaaattaaaaaaaaaagaaaaggaaaaaagaaaatccagaaataaaattattaacatatataaatttgataaatattgcatcactcataagtgagggaaattgacttttaataagcatggtgatgctagatctgtttcctatacaacagaataattttcaagcacgtcagagatttaaatgcataaataaaactttagaagcaccagaagaaaacaattgaattcctctcaaacctgatggtggggaaagctttcttagctaagatttaaaattcaaaagcaattagagaaaaaataaacaaattttattacaaatgttttttaagcattcataacaaaagatgtgtgaagcaaggtaaaaagacaaactataaaatggtaaatatatttgcaacttatatcagaaagagtttatatgcctaatatttatttatctatttatttttgagatggagtctcactctgtcacccaggctggagtgcagtggcgacatctccactcactgcaacctccgcctcccaggttcaagtgattctcctgcctcagcctcccaagtagctgagattacaggcatgtgcacccatgcccaactaatttttttttttttgtatttttaatagagacagggtttcaccatgttggtcaggctggtctcgaactcctgacctcaaatagtctgcctgcctcagcctcctaaagtgctgggattactggcgtgagccgccatgcccagcctatatgtctaatctataaagagctttgaaaaattaccaaaatgaaatggagaaattaacaattgtttgtaagcaaagaaatgccaatgactcttaaccatctgaaaacatgctgaatctcctatacaataagagaaatgcaagttcaaaattatacacattcttggctatttcctgtaaacctaatgaaactattttacctttgattttctctctgctgttgtctgaagacacatcatcataacctttgtgaatataaaactcatacatagcccgggcatgatggcacgtgcctataatcccagcactttgggaggctgaggcaggagatcccttgaggccagaagttcaagaccaggccaggctgtttaacctgtgatacccccgtctctacaaaaaattagccatgagtgctgtcatgcacctatggtccctgtcgtcagaggcatgtgaaccagagcaactccatcttgaaaatgagctgggtaaactgaggctgagacctactgggctgcattcccagatgtctaaggcattctaagtcacaggatgagataggaggacagcaaaaaatacaggtcataaagaccttgctgatacaatgggttgcagtaatgaagccgccaaatcccaccaaaatcaagatggccacgatagtgacctctggttgtcctcactgctacactcccaccagaaccatgacagtttacaaatgctgtggcaacgtcaggaagttaccctatatggtctaaaaatgggaggcatgaataatccacctgttgtttagcatatcatcaagaaataaccataaaaatggcaaccagcagcccgagggctgctctatggagtagtcattctttattcccttattttcctaataaacttgatttcactttacgaactcactctgaattctttcttgcaagagatccaagaaccctctctggggatctggaccgggacccctttcctgtaatgccgtttactccagaggctaaggcagaagattacttgagcccaggaagccgaggctgtggggtgagttatgattgcaccactgcacttcgtccggagtcatggaacgagaccctgtctcaaaaatatacaaataaaataaaattgaaaaaaattaaaactcctatgtaaaaaccgctgatattctatcctgagttgatgcaaacttggtaaagttggttatcttgtggggtttctccccttcaactataggtgattattactattattattattattattattattattattattattatttgagacggagtctcgctctgtcacccgggctggagtgcagtggcgcgatctcagctcactgcaagctccgcctcccgggttcacgccattctcctgcctcagccttccgagtagctgggactacaggtgcccgccaccac[131 bp omitted]caccgcgcccagccaactagtggtaatttttttaaaagaaaattcctcaagccagtccttcccaacgccccctcccttgtactctctgctggtgagttttccttctcccacaagctctgtctctgggtctccctgagactgggcccgttgtatgtgggacctagactgggccctgatgatcttgagaccctccttttgctcgatacaattatatcccaagtagaagagatgaacatgtaaacaagatgagcccgtgaatgactggatgtttccaaatgggaagtggcactttcggactgaacacggtgttagccttctaaggagactgggaagctctccaaacatgtaattttctgttgcttgttcttctagacctaagaagcaagggaagagtttcctttacaaatcggaagcacctgtaggatcaagacctgcagctcattcattctgaatcaagggagctaaatgccttccaatcggtgcaatgcagaggaattctagtgagccagcccccgccaatgggaagagaaggtgccaattgtctgaattccccggcacctataagggttggggggtggggcaggccaggcgatctccgttttgggagatgcttttgacaggaaggagcaggaagaataattctctgcagaggtgagctttgttttgttttgttttgttcttttctcttttctacctactcttttcctcatcatccacttccttgcagttacaatggctagacccttgagttgggcgcacccagtgggcccatactgaaaatcaaaagtgagagctagagattcaactgcaaacataaccagctctcattcataaaatccttgcccatctctgaaactcagctttcctgaccccgaagtggagtcctaaattcccaagttttctttcagctctgagggtctgagagccaggagactcatagcactagcaaaattctaagacctgaaagagatgtcgtggggtctccaggtgtccagaggtctagggtagccactgacagatgtagttagaaaaaaatcaaaatagctgtagacgcgaagaagaaatcgcgaggcacagagaaagaaagccgcaaggattaagcagcactgactttgacactgcccctctgcaaatattccttctcaataaacgcagatgtgtcacccacacggctcggctcgtgggcttaggaatttggtcaggttccacctgctggtttccaacactcacagcttgggctgaatttacttaacttagttcaatttccgttttctcctttgtaaattggacggaaagggattcatgggatataattcttaccaaaacgtagagttatatggactctagggtgatcaagacgtgaccacagaaccaaatggagatgacagacttttatcttttaaaaatgtttacccgctagaatagctatgtttaaaatggaaaataatcagcgttggcaagaatgtggagaaaatgaaactttagtgcattgttgatggggatgggaaatggaaaatagtatggcgattcctcctgctgacctcaggtgaaccgcccgcctcggcctcccaaagggctgggattacaggcatgagccaccgcacccggcctgctttttaatttttaatttttctgggtacatagtagaggtatatatttatggggtacacgagatgctttgatacgggtatgcaatgtgtaattaccacatgatggagaatggggtatccgtcccctcaaacatttatcctttgtgttacaatccaattatactattttagttatttttaatgtataattaaattgccatagactatagtcaccatgttgtgctatcaaatacaaggtcttattcagtccttctaattttttgggcacattaaccatcccccactttcctccccacaccccacaaccctccccagcctctgaacaccacccttctactctctatatccatgagttcaattgttgtgatatttatttatttagagacaggttctcgctctgtcacccaggctggagcgcagtggtgcgatttcggctcactgcaacctccacctcccgggttcaagcaattctcgtttctcagcctcccaagtagctgggattacaggcacccgccatcacagctggcttatttttgtattttttgtagagacagggtttcgccatgttgggcagtctggtctcgaactcctgaactcaagtgatctgcccacctcagcctcccaaagtgctggaattacaggcttgagctaccgtgcccaacctgttttaatttttagatcccaaaaatatgtgagaacatgcaatgtttgtctttctgtgcctggcttatttcatgtgtagatgatcctgatatacttctgtagggaaggaaatacttttccctctctctctctttattgatcttagattccatggctctctctttattgatcttagattccttggctggagtctgtgcattaggctcatgaaagacagattaacaaaagcacagcaaacagaagtttatgtgtgcatacccatgggagcactccatgatgagaacactcaggggtggttagaacttaggcttatatgtcatgctaacaaaagaacaatacattctcttttttttgagacggagtttcactctgtcgcccaggctcactgtaacccccgcctcccaggttcaagcaattctcccgtctcagcctcccgagtagcttggattacaggtgcccgccaccactcccagctaatttttgtacttttagtggagacagggttttg[141 bp omitted]aaagacctcgaattcctgggggggtaaattgtgagaaggtaaatgtatgggggagaaaatggaggatgagggctagttcataaggtttcttgtgtagatttttctggcgccctcgcactgctgtacgcatctggagcttgtctccggtgattaacttctgtgtttcctggtagagaaggggaaaaggggcacctttacaaactgatgtcttgcatttaggcaaatcaagggaagacagattttttcttgtgtctgctccttctcaagtatcttcagctcaaaatagtccgtttgaaatacacaacaaattattatgaactatagtcacactactgtgctatcaaatgctagagcttactccttctatccattgtatttttgtacctattaaccaaccgctcttcatccaacccctcccacctgcctttcccatcaatatgtacaattatcacgtaccaatttttaagaatgagtacaacaaactggaatatttgggggtggcgtattctgccgtccctcatttctctgaaaggccaggaactccttgctcagacccatcaaccacctgcatctggacgtgtgctctccaccctcttcctgccaagatcacttcagacccagcctgtgtcctcaattataccccttctcctgctgttatttcctcacttgccaacactacttttctcttctctactcccttgaatgtacagacatcccacagcatttccatctttaggaaaaaaaaatttttttttgagacggagtctctctctgtcacccaggctggagtgcagtggtgtgatctcggctcactgcaacctccacctcacaggttcaagcaattctctgcctcagcctcatgagtagctgggattatagacgcccatcaccatgtctggctaatttttgtatttttagcggagatggggtttca[141 bp omitted]atggaaagcggagcagggaggagggataaagagaggttggttcgtaggtattagaaagggaagagggaatgagatagaagatgccccactgctgcctttgaagaaggaggaaggagcaaaaatccaaggatggcatgtggcttctagaagctggagaaggccaggaaacagattctccccctagagtctccagaaggaaacagccctgccaacacctcaattttagtccagtgatcttagcccatttcaggcttctagcctccctaactgaatgttttatcttaaaaatactgtgctgtcggccaggtgcggtgactcccacctgaagtcccaacactttgggaggc[134 bp omitted]gaggcaggagaattgcttgaacctgggaggtggaggttgcaatgagccgagatcgtgccactgcactgcagcctgggtgacagggtgagactccatctcaaaaaaaaaaaaaaaaaaaaaactgtgtcgtcttaagccaccaaattcatggtaaattcgtcacactagtgcaacaactcacaattcttctttccaggattatgtctatagctccctacccttgttctcagtaggagagccagccagaagaatccttctaaaaattatagacgtcccacgccagtccaatcaggtcctgtgtgacctcttgagatcacctccactgtcttccccttgcccattcacctccactcaccctggtcctgctgtttctcaacagctccaggcacgtcctggccatagggtggtggtccttgcccttctgtctggaactcatctgatagccacacagcccattccgtgacctcttacctcctcctctcctccaagcttttgctcagacatccctgcttcagtgagccctttcgtcagccttttacaaatcgcagcaggctatttctcacttcctgttctctctcgcctctcctttttcccatggtgtgtatagtcttccatcgcatcagtgtgctcccatgggcatgcacacataaataaacttctgtttgctgtgattttgtgaatctgtctttcatgaccccaatgtacaagcctccagccaatgaatctaagatcaataaagggacagagaaaagcttttcctcccctacactttattttcattcactgaaatcttagccacatgaggacaacaattttttgtgtatcttttgctcaccaacgtatccccagtgccaaaaatagagagtttggcgtaatatttgacactgggatatttcagtgagtaaatccagaaggactgtgttatgaactgaatgtctgcgtccccccaaaatccacaggctgaaactctaaccaccaaggtaacggtagaagaaggcagggactttgggaggtgattaactcatggggccagagccctcatgattgggactccagcccttatgaaagagcctccagagagttcccacaccccttcctccatgtgaggaggacacagcaagaaggtgctctctatgaaccaggaagctgccctcaccagacactaaatctgccaaccccttgatcttggacttccagcccccagagcagtgagaaatcaatgtctgttgttactaagccacccagtgtatggtatttgttatggcagtccaaacagactaagacagactggcttgtgcacacaccatctcacatgtgcaagtgtatctgtaaggtgcagtttttttgttgt[131 bp omitted]cctca[133 bp omitted]agcctcccaaattgctgagattacatgcgtgagccaccacgcctggccttttttgtttttgttttttttgagatggagtctcgctctgttgcccaggctggagtgcagtggcgggatcttggctcactcactgcaaactccccctcttggtttcaagtgattctcctgcctcagcttcccaagtagctgggactacaggtgcatgccaccacgcccagccaatatttgttttttttttttttttttttaagtagagacgggttttcaccatgttggccaggatggtctcaatctcttgacctcgtgatcctcccacctcagcctcccaaagtgctgaaattacaggcatgagccaccacacctggcctcaggttgcagttttaggagtagaactactgaattccatggcagtgcacacgattggtagtattgtgaaaaggcctttcagataggttccccctgcttatgttcccttcagcagtgaatgaaagtaaagcaaaacgatgatgtaactgccaacatc[132 bp omitted]ttgcaacctctgcctcctgggttcaagcaattctcctgcctcagcctcccgagtagctgggattacaggcacccaccaccacgcccagctactttttgtgtttttaatagaggcagggtttcaccat[143 bp omitted]tggtcagcaatggtcatggaataagtagaggtagaaaatgtgtgactgtgttaggctcctccatgcagcgccacccactggacggaaggagcactagcaagagtcagccacccaggagcatatcacctttgtcctgggaccaagcccagctactctggacccaagggaggactgagtcaattaaacaagtttatccagatgtttgggtgtcacataagttataagagggagaagtgttaaagaagaagctattggccaggtgcagtggctcacacctgtaatcccagcactttgggaggctgaggtgggtggatcacttgaggtcaggagtttgagaccagcctggccaacatagtgaaaccccatctatactaaaaatacaaaaaaattagccaggcatggtggcaggtgcctgtaatcccagctactcagggggctgaggcaagggaattgcttgaaccagggaagtggaggttgcagtgagccgagatcacaccactgcactccagcctgggaaacagagtgagactctgtctctaagtaaataaataaataataaataaataaactattattggaagttggggcaggggggacaaaaatacacccatgatcctttttattttatttcttttttacatttcttttagatacaggggtacatgtgcaggtttgttatataggcaaacgtgttatgggggtgggtttgttgtacaggttatctcatcacccaggtattaatcccagtacccattagttatttttcctgatcttctccctcctcccaccctccagcctctagcagactccagtgtgtggtgttccctctatgtgtccatgtgttctcatcgtttagctaccacttataaatgagcacatgtggtatttggtttcctgttcctgtgttagtttgctaaggaataatggtctctggctccatctatgttcctgcaaaggtcatgatctcattcttttttatggctgcatagtattccatggtgtttatgtaccacatttttttatccggtctatcactgatgggcatttaggttgattccatgactttgctattgtgagtagtgctgcaatgaacatacacaggaatgtgtctttataatagaatgatttatattcctttggatatatatccagtaatgggattgctgagttgaatggtagttctctttttaggtctttgaggagttgccccactgtcatccagagtagttgaactaatttacactcccacacacagagtataagtgttcctttttctctgcgacttcaccagcatctgttattgcttgactttttaataatcaccattctgactggtgtgagatgacatctcgttgtggttttgatttgcatctctctaatacatgatccattttttaagaatacagcatctgttattgcttgactttttaataatcaccattctgactggtgtgagatgacatctcgttgtggttttgatttgcatctctctaatacatgatccatttttttaagaataaaaactttgttgaatttgagatcacttttaatctaatggagccttctaaccaaccatatattttctagattttagcttcactgaattattttacctgcttctaatttttcttttcgctaaaccttttgtgaaggctttgatattttgcttgcctcttccccaaaagaagtcatggagaatagaaactacaaacaatccattagtctaatggactaatcccaaacattccatgcatcttcagtttttccatagggcagagaatctttgaggaaaggaggtaaagggagtacccggcacgcagaatacctgccaagtaagcattacacgaatctgttttcttgggtagtgttttcatcttcttgttttattgttttatgtctctgcaggtctcgtgtttctctcttccaatcggttgtctttatcgtggacactgaggtgttctctgccttgactaaagatgagtgacgtgaatccaccctctgacacccccattcccttttcatcctcctccactcacagttctcatattccgccctggacattctcttgctaccccggctccccatgtgaaaatggggtcatgctgtacatgagaaacgtgagccatgaggagctacaacggttcaagcagctcttactgactgagctcagtactggcaccatgcccatcacctgggaccaggtcgagacagccagctgggcagaggtggttcatctcttgatagagcgtttccctggacgacgcgcttgggatgtgacttcgaacatctttgccattatgaactgtgataaaatgtgtgttgtagtccgcagagagataaatggtgagtgttgatctggtggataaagtgggggtgggcttggctgctgggcagctaaactactctagtcaccacccctatcacttattggccttctgagcaagaaagcaaacagtggaggaagataatggatctaacccaaaggcaaagactgtcatacgggcatttttttaattttatttttctgagatggggtttcgctcttcttgcccaggctgaagtgcaatggcacaatctcggctcactgcaaaccccgcctcccaggtacaggtgattctcctgcctcagcctcctgagtagctgggattacaggcacccaccaccatgcctgggtaatttttttttatttttagtagagacggggtttcaccatgttggccaggctggtctcgaactactgacctcaggtaatccgcctgccttggccccccaaagtgctgggattgcaggtgtgagccactgtgcccagcccatatgggcctattttttaaaaacttaactgaatactgcttatatgaggtgaacgttaaatgaagtcatagagaagtaggaagtaaaatagtggaaaagcatatgctatggaaacagcagaagacagctggtatagctatggtgatgtcaggagtgctatatttaaagcaagaaggttaaacactttaaaaggccatttcgcagcaacaaagggtgaatcccactggaggatattgtaatccaaaacctcatcttcaatatgaataaagcagagctggactacagtcatccccttatccaaggttttgctttctgaagtttgggttgatcatggccaaaaatagatgagtacagtacactgagatattctgagacagagagagaccacatttacataccgtttatgatagtatagtattataattgttctatttcattattattgttaatctcttactgtacctaatttataatttaaacttttatcatagatcggtatgtattttttttctattttgagatggagtcttcattctgtcacacaggctggagtgcagtggtgtgatctcagctcactgcaacctccacctcccaggttcaagcaattctcatgcctcagcctccccagtagctgggattacaggtgcgcaccaccacacccagctaatttttgtatttttagtagaaacggggtttcaccatgttggccaggctggtttcaaactcctgaccttaggtgatttgcctgcctcggcctcccaaagtgctggaattacaggtgtgagccaccacacccggcctagatatgtatttaaaaaaatcagtatccacattgttcagtactatccacagtttcagatatccaccggggatcttggaacatagaccctgcagagaaggggggactactgtattaaaggaaaatacaccaatccagaaacatgataggagctgtgaacccgcctctcccaatagctgatattacaagtagtcagtctcattggtaagaatggagaaaacgtcagctccacagttttaaacataaacacaggagagtgggtgccttacgtctccttagccactggcaccccaacagctggctcagcacctagcatgtcataggtgctcaaatattagatggctagagagtaattgattgtgaaaagggactttcttttgataaggcagcctaggaagtcctctttgaggaaatgatgctaaggttgagacctaacacaggaggaaatagctcatcatgtgaaaaggagagagagtcaccggaaaagaaaatcagaggggatggaaaccccgtgacccagtggtagagaaaatcttagtgttaaacagaaa[138 bp omitted]catggtgaaacccagtctctactaaaactacaaaaaaaaaaaaaatagccgggcgtggtgacgggtgcctgtaatcccagctattcgggaggctaaggcaagagaattgcttgaacccaggaggcagaggttgcagagggctaagatcatgccactgcactccagcctgggtgacaaaagcagaactccatctcaagaaacacacacacacacacacacacagagacacacgtacgcagttgatcctcattgttcatggattctgtattcgtgaatgtgcctactcattaaaatgtattcgtaacccccaaatcaatacttacagcgctttcaagatcattcccagacagcaacgcagcaaaaaaatcgagctgacctcctagccgaggtcaaacaaggtgacgctctgccttctggctttagctctcaccccgtaagccagtgtcatttccacgcctatgtggtgccacacttttgtgctttgagttggtggttttgctgtttaaaatagcacccaggctgggcacgatggctcacgcctataatc[131 bp omitted]cgcatctctactaaaaatacagaaattagccgggcgtggtggcgcacgcctgtagtcccagctacttgggaagctgaggcagaagaatcgcttgaacccaggaggcagaggttgcagtgagctgagatcacaccactgcactccagcctgggtgacagagtgagacttagtctcaaaaaaaataagaataaaaataaaaataaaaatggtacccaaaactagtgctgatgtgcctttccatgttcctcagggcaagaaggccatgctgtgccttagggagaaaatacgcttgttagctgagcttccttcaggcaggatttatcagtgtggttgaccacgagctcaatgttaaataatcaacaatatgtactaaataaggtgtctttaaacaaaaacacatgtaaaacaagtttttatattgatcagtccatgaaaatgttgtaaccagagactagcaggaaacaaacgttgtgttttcctgggggcaatggttcagtattagcgaatttggtgttcacaagaattttatagacgagaactaccacacataacaagaatcaatgactatatgtgtatgtgtatgtagagatatacacgtgtatgtacacatatgtgcacacatacatagatattaagctagaagttccttggtatccatgggggattggttccaggctctccctcaagggtactgaacaaattcatgggtgctcaactccttcatgtaaaatggcatagtatttgcatagaacccatacacatcctcccacagacttaaaatcactctaaattacttataatacccaacacaatgtaaatgctatgtaaatagttgttatcctgtattgggttttttatttttttgagacaaggtcttactctattacccaggttggagtggagtggtatgatcatggctcccttcagcctctgcctcctgagctcaagcaatcctcctgcctcagcctcctgagtggttaggactataggcatgccaccatgcctggctaattattttttatttttttagtagagttgaggtcttgctatg[136 bp omitted]ttttattgggtttttagtttatgttccatcctcagttggttgatcccaccgatgtagatcccacggtaatgaaaggccgactggacgtatagatacacccctacgtagatattaaactgtgtatggattttacatacacttgtgtgtgtaagagtatgtgtgtatttatatttctccctcagtgtctggctgggctatccatttataacatgtttttgaacaccttactcaatgcattgtagaacaacaccttttctcatttcctaaaattgctgtgatagagatagatctaggtgattttcttctccctgaacggaggtggtgagaggatgagactctgaagccatgtggctgcttctgtcctaaaaaggccattggctccatgctgtttccctgctaccaagatcttatcattcccgtggaacagcctccttttttctgttacagccattctgcctaccttggaaccagaggacttgaatgtgggagaaacacaggtgaatctggaggaaggagaatctggtatgtgcctgtatcacagcagaccctggtgaaaaaatgggctatggactgggatgagctgctcagttgctaaggcaagccagattttaagttaccatgtccagtgtttcttctacaatcagaaccaacatggcgaaactctgtctctactaaaaacacagaaactagccgggcgtggtggcagttgcctgtagtcccagctacttgggaggctgagtgagaagaattgcttgaacccgggaggcggagggttgcagtgaggtgagatcacgccactgcactcttgggtgacagattgagactccatctcaaaaaaaataataaaataaaaaaacagacacaaaccattggctcagcggtccccaacccccgggccatggactagtaccagtctgtggcctgttaggaactgggccacacagcaggaggtgagtggcagggagcaaccaaagcttcatctgtatttacagctgctccctattgctcacattacctcctgggctctgcctcctgtcagatcagcagtggcatcagattctcataggagtgcaaaccctctcgtgaactgtgcatgcgagggatctaggctgtgctctcctgagaatctaatgcctgatccgtcaccgtctcccatcacccctggatgggaccatcgagttgcgggaaaacaagctcagggctcccagtgactctacattatactgagttgtataattatttcattacatattataatgtaataataatagaaataaagtacacaataaacgtaatgcacttgaattatcccaaaaccatcccccgccacctggtccatggaaaacttgtcttccacttggggaccacttcaatagagtg[138 bp omitted]cctgccttagcctcctgcgtagctgggattacaggcacatgccaccacgcccagctaacttttgtatgtttagtagag[138 bp omitted]agagtctcactctgtcacccacactggagtgcagtggcgcaatcttggctcactggaacctctgccgcctggattcaagcaattctcctgcctccacctcctgagtagctgggattaccggcgtgtgcaccaccacgcctggctaattttgtatttttagtagagacagggtttcaccatgttagccaggctggtcttgaactcctgaccccaagtgatccaccatcctcagcctcccaaagtgctgggattacaggtacaagccgccacacccggccctcccaagtatttctgatttgaatggagataacacggctaacactacagcagcgatcttctatctgtgaggcaagaaatacaaagaaagggctgagagaatcgtgatgctgctggacctgaaactatggcgccactgaacctaatttcaacagctttacgcccgccatacttctcacgtagaaagcagtccttgttttgtttaagccacttcaagctgagttttctgttcgttggtgcttcctagttgacacagcagtatcaggaaaggttatttcatttatgcaagggcatcacggggcttcacgtagacatcgagactggttttcttattgctctattagttcttgcaattcactctgatgtcataccctttatttctcccatctcacaaatctaggtaaaatacggcggtataaatcgaatgtgatggaaaagtttttccccatatgggacattacgacttggcctggaaaccagagggacttcttctaccaaggtgtacacaggcacgaggagtacttaccatgtctgcttctgcccaaaagaccccagggtagacagcccaagaccgtggccatacagggagctcctgggatcggaaaaacaatcctggccaaaaaggtgatgtttgagtgggccagaaacaagttctacgcccacaagcgctggtgtgctttctacttccattgccaagaggtgaaccagacgacagaccagagcttctccgagctgattgagcaaaagtggcctggatctcaggacctcgtgtcaaagattatgtccaaacccgaccaacttctgctgctcttggatggctttgaggagctcacatctaccctcattgacagactggaggacctgagtgaagactggaggcagaaattgcctgggtctgtcctactgagcagtttgctgagcaaaacgatgcttccagaggccacgctactgatcatgataagatttacctcttggcagacatgcaagcccttgctgaaatgtccctctctcgtaacccttccggggtttaatacgatggaaaaaatcaagtatttccagatgtattttggacacacagaggagggagaccaagtcttgagtttcgccatggaaaacaccattctcttctccatgtgccgggtccctgtggtttgctggatggtctgctctggtctgaaacagcaaatggagagaggaaacaatctcacacagtcatgtccaaatgccacctctgtgttcgtccggtatatttctagcttgtttcccaccagagctgagaacttttccagaaagatccaccaagcacaactggaaggtctgtgtcacttggccgcagacagcatgtggcacaggaaatgggtgttaggtaaagaagatcttgaggaagccaagctggatcagacgggagtcaccgccttccttggcatgagtattcttcggagaattgcaggtgaggaagaccactatgtctttaccctcgtgacttttcaggaattttttgcggccttgttttatgttctctgtttcccacaaagactcaaaaattttcatgtgttgagccacgtgaatatccagcgcctgatagcgagtcccagaggaagcaaaagctatctctctcacatgggacttttcttattcggttttctgaacgaggcctgcgcttcggccgtggaacagtcattccaatgcaaggtgtctttcggtaataagaggaaactgctgaaagtcatacctctgttgcataaatgtgacccaccttctccgggcagtggggtcccgcagttattctactgtctgcatgaaatccgggaggaagcctttgtaagccaagccctaaatgattatcataaagttgtcttgagaattggcaacaacaaagaagttcaagtgtctgctttttgcctgaagcggtgtcaatatttgcatgaggtggaactgaccgtcaccctgaacttcatgaacgtgtggaagctcagctccagctcccatcctggctctgagtaagtgcttcggtccctccttgggtagcccgtcctacccggaggccttgactatggtgtcccgggtgtttagggggtcaatctgcaaacctttctgatctctttcctagcctagtttgcacagtacttctgttgctttgttttgttttgttttgttttttgagacagagtgtcactctgttgcccaggctggagtgcagtggtgcaatctcagctcactgcaacctctgccttctgggttcaagcgattctcctgcctcagcctcccgagtagctaggattacaaacgcatgccactgcacccggctaattttggcatttttagtagagatggggtttcaccatgttggccaggctggtctcaaactcctgacctcaggtcatccgcccacctcggcctcccaaattgctgggattacaggcatgagccatcgcacgcggccagtacttctgttttaaaacaaacatatatctacggtgatacatgtttgttttacaaactgtcccagtttgtttaggattaaggagatttctcagacccaggactttgttttactgccaggactgaaggtgttcctgggatataggactttccgtgctaaacctgggagaatactgggcaaaatgagatcccttgttcaccctccctccctctgtgctgcatgcccataaagatgggaccttgcttcatctatcactcctacttctgtttttgagatagggtctctttctgtcacccaggaaggcagtggtacgatcgtggctcactgcaacctcaaccttctgggctcaaacaattctcccacctcagcctcccaggtatctggaatcacaggcatgcaccaccatgcctggctaattttttatttttttggagagatgaggtttccctgtgttacccaggctaatcttcaactcccggcctcaagcaatcttcccaccttggcctcccaaagcactggaattacaggcatgagccgctgcgcccagcctcactcctacttttgtgtatcagaagcttttggtctcaaggaaagtgctgctaatggaacttaacgtgatgatgaagacatcctgaatctgtcttatccaatacaggagccactggccacaggcaaccactgagctcttggaatgtggctggtgtgaccgagtgaatgaacgtttacattttatttaactttactgaatttaaatgtagatagctacatgcagctagtagctaccatatcagacagcacacctctagagggtctttctttccgtgtaaaaa[133 bp omitted]aaaaccccgtttctactaaaaacacaaaaattagccaggcatggtggcgggcacctgtaatcccagctactcgggaggctgaggcaggagaatcacttgaacccaggaggcagaggctgcagatagccgagatcgcgccactatcttaaaaaagaaaaaataataattatatatatatatatatatatatatatatatatatatatatatatatatataaaataaggttgttaaacgtgttaaaatctacaacacactgaataagtccagtccttcatttagtgctcagtagatacaaactgttaccactcatgtaattcctcatcccctccactcgaccaaaactcttccagaagatctttattttggcaaatataatggatttctttttcttaagaagtggcaaaaagcactgactactcatttcttcatattggttgatatttatttggcatttgccatatagcagacacaatgtcaagcacttgctttatgtgaattatttctcccttcaactccatgttgcactggaggtcaggtgtatggagcaccttgtccaaggtcacacatctggtcgaagctaagacgagctaaaatttgacccccgtggctatgacgagaagagagaggcgatttagactgacccctggcgagagaggggacattgtccttctgctgcataatggaaatgccttcttgttccttaactgctctgcgaaaaggaaccacaatctcttccagattcctgtctttccatgaaagactgcataagtcttcagcatatggatgtgtagcgctaatgctcatcctagacatatactgggctagtgtgtggatagataagtaaaagttggtctctccttatgggatgagacatttaaatttcaagtaatttaagttctgttccattcttcaccatgacaagcagtgtgcagggcttctcagccatggctgagtttctccagggcagaggtaagaaagctacagccaggaggccaaacctagctttctgcttgtttaggtaaatacagtttgattggagcccggccatgcttgtgacatattgtctgtgactgttaaccacactgccgcggcaggactgagtcattgccaggaaatttacggccagcaaagctgaatatatttgctacttggtcaattacaggaaaaatttgccaacccctgctctagcatatatttttatttattgtcttattattttttgtagagatgggggtctcactttgttacccagcctggtcttgatctcctgggctcaagaaatgctctcgcctctgcctgccaaagtgcggggattacaggtgtgagccaccgcgtccagccagggcctattttttgttttttgtttgtttgtttgcttgtttgttttgagacggagtctcattctgtcgcccaagctggagtgcagtggtgaggtctcggatcactgcaacctccacctcctgggttcacgccattctcctgcctcagcctcccgagtagctgggactacaggcgcccgccaa[174 bp omitted]atgtatgtttgttagtttgttttgagacagagtcttgctctgtctcccaggctggagtgcagttgcgtgatctcggctcactgcaagctccgcctccctggttcacgccattctcctgcctcagcctccccagtagctgggactacaggcgcccgccaccacgcctggctaattttttgtattttttagtag[155 bp omitted]tcacacatcacatctctaactttatcagcagggatatcacttcatatttcttgggtatgtccctgaaccaaactgagggtcaggctgcttattctcacagcccaataaccagatgcagatgaactgggaaacaagagagtctatttctgtaactgggtacacagggagaaggccaagaaatatcaccagaccaattaaaaattacaaagttttccagagcttatatgccttctaagctatatgtctacgtgtaagtgttcattcctctgaagacgtaagtgattaacttcttctaatctataaggaaggtctgagtcctgaagaccttcctctggagccttagtaaatttacttaaactagatgggtccaggtgctgaggtcattacctttatcttgtctcctgctaaatcatggaggcttggggggttctttcagaccccaataaaacttgtttgtggaggtctggggagtttcttcagacccctaataaaaacttgtttaatcctgaatgggtcctgttgagaattccttcattatcctgtcatacttcaaggcccaggaaaggcctgggcaaaactcttggtggtcttttgttacattccagcctttgtgtgagggcactggctctgtcagcttttaatatttaacttacccactcagtcggtgctgaaactgttgtgatggaggcctgcctgttcagctgctagcgagacctggcctgccacaggtagaatgaattctgttcactcagatattgaatggctacatcagaccatgtttttttcatgtctactcccaacttatgtgggcaattccaacacattccacaaaatcacattcaaggggccctccagtccctgaggaccttttattagggaggggaataaacaccagagcttgttgttcaacttggggataactgttggtcacccgactaagacctcaagaatctaagcacagtgaatcacaatgtctttctatgatgctgcgtaaagacctgacatccgtagaaatcttaagacacgacatatttctttcatgttggttagtccattgatcacttttgtatgggttcctgcagggagttgatatcattcctacttatttgcatttctatgtatttgacggatgtgaaaatggatgaatctatttcatgggatttaaattttatgcaaaaattacgctagtgtaaatattctaaaaattgctttttcatctcatgtgtcttggcaatgtctatacatgccattttcaatgaagtattctttgaaaaataggtgtgctagagatgat[135 bp omitted]cctccgcctcccaggttcaagcgattctctttgcctcagcctcccaagtagctgggattacaggtgcccaccaccacacctgtataatttttttgtatttttagtagagacagggtttcactatgttggccaggctggtctcgaactcctggcctggtgatccgcctgccttggcctcccagagtgctgggattacaatgtgagccaccgtgcccggccactttcaactatttctttaatgcaaccaacagcaatcttcacatgtgtatcttggtcagcctctctgaaacgattgtatggggaagaatgaaagagaaagtcagcaggtccttctacggccaaactacatgccaatctagctctggatttttctttcttgtactcactgtgtcaaaaagattaatttttcctttattctgatcctatatttttttaaaaaataagaattatatatacacagggtaagaatgtaggtacagaatataattcaatctctgccccccacataaatctcatgtaattaaaaaagcaattcctggttaggcacggtgattcacacctgtaaccctagcactttgggaggccaaggcaggaggagcgcttgagcccaggaattcaagaccagcctgggtaacatggagaatccctgtttctacaaaaaatacaaaaatcagtcaggtgtggtggcgtgtgcctgtaaccccagctcctcaggcagatgaagtggattgcctgagcctgggagttagaggctgcagcgagctgtgttcagaccactatactccagcctgggcggcagagtgataccttgtctcaaatataaataaataaaaaataaaagcaacttccttttttccaagtcatgggaaaatacagggctcttatttgtgaccatgagtctccctggaatgaaatgagaaacctcgtgatggtttttctgagtgctttatttaaatgaggatgtcttagagtcactagaggcctatggccctaaccaggatagggaacaccagccctggggtttcctagtagattttctccagtttaacgaagaggtgttttctctcttctcccttccatgtagagcgccagagagcaatgggctgcatcgttggtggcaagacttatgctctgtgtttgcaacgaatgataagctggaagtcctgactatgaccaacagtgttttggggcctccttttttgaaggctctcgcggccgcactgaggcaccctcagtgcaaactgcaaaagctactgtgagtataacacaaatcccactggaaggaactttatggagatggtctgtttcccatccactttcttcattccctctccactcacactagacttccggaaagcacccatgtccagccttggacggaggtgcaggaggaatgagtcatggggtgcgtggtgaaggaaaccacacacgggagccaggctgacggctcgatctgtctctagttactgttagcttggtgcaaatgccattgcagtttttgccattagtgacatttgcaccaacttaatagctctgtgtccttaagtgaatggtgtacacagtgggtcacggaattcctgacatctccctggtgcacttcaatgcgcccatccataaaatgttcagcccggtgctgtggctcacgcctatttacttcagctcaggtgttcgagaccagtcccagctacttgggaggctgaggtgggaggatcacccgagcccaggaggcagaggttgcagtgatgttgagccatgatctggccactgcactccagcctgggtgacagagtgaggccctgtctcaaaacaaactataaataaataaaattaaatgatcatcacgacagagagatgaaatgcagtcccgcacgtgaagcccacaggaccgtacctgaagtggaatcagcacactgtgtaatccagggtgtggtggttactctctggagggacaccgccttacagaagccacgtgcgacctgagcactgagtatggttcaccgctgcattcctttgaagtattaatatgtactattatccccccccttttttaaaacagagtctcactttgttgtccaggctggagtgcagtggctggatctcagctcactgcaacctccccctccagggttcaagcaattctcctgcctcagcctcccgagtagctgggactacaggaatgcaccaccatgcctggctaatttttgtatttttagtagagatggggtttcaccatgttggtcaggctagttttgaactcctgacctcaagtgatctgccctcctcggcctcccaaggtgctgggattacagatgtgacccaccatgcccagcccccattttttagcaaagtgagagctggagaggttaagtgatttatctaagatcctgtggctgacaagccttaggtaaatcactccaaggcagacagccttaagctcgtcttccccaacactctgtgcttctctaacacaccactgttagcaggtgcctgcgtggggtaagcctcaccaaagagggcacatttgaactgggttgggaaggatgagatttacatggaagaggagaaacactacttcattttttttccaggtggggtcttgctctcttgcccaggctggagtacagtggcatgatcatggcttactgcaaccttgacctcctgagctcaagcaatcctcccacctcagcctctcgagtagctggggccacaggcatatcccaccattgcccggctaattttttttttaattttttgtagagacaaggtctccctaggttgcccaggctggctttgaactgctgatcttaagtgatccacctgtctcagcctcccaaaatgctgggattataggtgtgagccattgcaaccagccactattttttataatgtaagagtgagcgtgtatgcgttgcccaccgtctgctaggctatcttaggttctttgcacatgaatgctcttaaaactcatcccaagcagtaggtgtccctatttcacagatgagaaactgaggcatgagtttacatcattactaagcagtcaaatctggctctagaatcagttctcttagccaccactccatacgctatctctccagagtttttaagatccaaaaacccgataattcaccatgtgaaccactggccccttccttgaaataagccaccaggcatcacatggcccctggccattatcagatatattttctctcctattattgtgatagttattattcgctcctgcttactgagtgcgtactatgtgacaagcaatgggctgagaatttcatgggattaattctcacagccattctaaggagaaaatgtcgtatgctctcccttgtagacctgaaactaaactttagagaggttacgtgatttgtgaaagatggtgcgactagggatgttaagctgagaactcagttctgaattccatgttgcacagaacgggcccctccttatggactgactgaatgtagaagaaatagccggtcgggcgtggtggctcacgccggtaatcccagcgctttgggaagccaaggtgggcggattgcctgagctcaggagttcgtgaccagcctgggcaacacggtgaaaccctgtctctactaaaaatataacaattagcttggtgtggtggtgcacatctgtaatcccagctacttgggaggctgaggcaggagaattgcttgaacctgggaagcggaggttgcagtgagccgagattgcgccactgcactccagcctgggtaacaaagcaagactctgtctcaaaaaaaaaaaaaagaaaaaaagaactagttagccacctccgttgtggtgatggcatcacgaatatatgcatagtccaaactcatcaaattgtatatgttaaatatatgcaggttttttaatatcaaatcgattatacctcaaggaaactgtttttaaacaactaattagaaagaaagagattcagcagtgaacataagcattagaggtgcaaggcaaatctgtgtccctggttttagaaaaggcgtgtgatggccaggagtggtggcccatgactgtagtcccaacactttgggaggctgagccagtaggatcacttgaggccaggagtggaagagcagcctggacaacatagtgagaccccatatctacaaaaatttttctaaaaagaaagtagatcagaaagttgagctttgtaggccgggtgtggtggcttatgcctgtaatcccagcactttgggaggccaaggcaggcagatgacttgaggtcaggagttcaagaccagcctggccaacataataaaatcctgtctctattaaaaatacaaaaattagccaggcatggtagtgggtgcctgtagttccagctacttgggaggctgaggcaggagaatcacttgaacctgggaggcagaggttacagtaagctgagatcgcaccactgcactccagcctgcgcaacagagtgagactccatctcacaagaaaaaaaaaaagctaagctttgttattaaaataaagaaatataaataaaaattttaaaaccaaaagcatgattttaggagagtgcagggaaaaccagtcctccgaatccttcaggaataggatgacgttccctttgctttaagaaagcctttgtagacctcagtccaatcgaattctgatcctgtgagtcatttatttttttaaattttttttattatactttaagttctggggtacatgtgcagaacgtgcaggtttgttacataggtatacatgcgctgtggtggtttgctgcacccatcaactcatcatctacgttaggtatttctcctaatgctatccctcccctagccccccacccccccagaggccccggtatgtgatgttcccctccctgtgtccatgtgttctcattgttgaactcccacttatgagtgagaacatgcggtgtttggttttctgtgcttgtgttagtttgctgagaatgatggttccaacccaaatgcccatcaatgatagactggataaagaaaatgtagccattcattttgacttacagttttcccaggataggacctgaataatcacaggtttgtgtcactctttaatgtctgcatcctgaattcagttgtaaaccccctgagagtgggactgcacctgtcccacgtgcagcttccgggagcctcgtttgtgaggccacagaattctacgactgtggacgggaccctattccaaggagacgctcttccctctccagcctaaggcgtgtgaatagcaccatgttgaaccaggacttaatcggtgttttgacggggaaccagcatctgagatacttggaaatacaacatgtggaagtggagtccaaagctgtgaagcttctatgcagggtgctgagatccccccggtgccgtctgcagtgtctcaggtgagatttgagaggggggttagagtgggaaccggggtacccggatggtcttttcaagggcggtgatgagaggctcagtttccctctgtcctttcctttgatctgctgttggctttgttcaactttaaaagtacaatttgggccgggcgcggtggctcacgactgtaatcccagcactttgggaggctgaggcgggaggatcacgaggtagagaccaacctggccaacatggtgaaactccatctctactaaaaatacaaaaaattagccagcgtggtggcaggctaatctcagctactgtaattacgggctgtaatctcagctactcgggaggctgaggcaggataattgcttcagcccggtaggtggtggttgcagcaagccaagatcgtgccattgcactccagcctgagcgacagagggcgactctgtctaaaaacaataaaaataaaaagtgcaatttgaccatgctctagatccgtctgataccaggaaatctgagccccagctcctactggattgcaaaagctggatattttctaactttttattttaatttttgtgaatacatagtaggcatatatatttatggggtacgtaagatgttttggttcaggcatgcaatgtaaaataatcacatcttggagaatgggagatctagcccttcaaacatttatcctttgtattacaaacaattgatttatacttttagttattttggaatgtacaatttattattaactatagttcctctgttgtgctagcaaatactaggtcttattctttttcaacctgttaacccgtttatgcccgaggctgcaattttttgaattttttcaatcagagtttggtgatgaccttgagcagtgagatataaataactcccaagtgcttagcattccaataatggaatcctaggcataaatggttttaaccatcctgaccttcccctgctctccaccctcccactacccttcccagcccctggtaaccatcctcctactctctatgtccatgagttcaattgttttggtttttagatcccacaaataagtgagaacatgctgtttgtctttctgtgcctggcttatttcacttaacagaatggtctccagttccatccatgtcgttgcaaatgactgaatctcattctttttcatggctgaatggtactccattgtgtatatgtaccacattttctttatccatttgtctgttgatggacacttaggttgtttctgaatcttagctattgagagcagagctacagcaagcatggtagtgcaggcatctcttcgatggactgatttcctttctttggggtatataccagtggtggatggctggatcacatggcagcctgaaagagctgatttttcatcattcaggaatttcatgagccagttgttaaacaacgtttttaaaaattaaatcataggcttacaaatatattaaacaacaaaagtcatagattatcaaaatgcattgtttcctaatcattttatggttcattattatcactgctagggtgcagcaaactttttctatgacaagccaggtaagaaacacttctggcctctgggcccatgccatcatcatgatgactccattctgccactgcagtgctaaggctgccggagttcgtaggtaaacaaatggatacagctgtgttccaataaaactttatgaacactgaaacatgaatttaatataattttcatatgtcacaaaatattcgtttaataatttttttaaccatttaaaaatttttgtggcggctggacaccgtggctcatgcctgtaatcccagccctttgggaggctgaggtgggtggatcacctgaagttgagagttcgagaccagcctggccaacatggcaaaaccccgtctctacgaaaaatacaaaaattagctgggtgtggtggtgcgcacctataatcctagctactcaggaggccgaggcaggagaattgcttgaacccgggaggcggaggttgcagtgagccgagatcacgccattgcactccagcctgggcgacagagcaaaaactccatctcaaaaaataaaaataaaataggccaggcacggtggctcacgcctgtaatcccaacactttgggaggtcaaggtgggtggatcacctgaggtcaggagtttgagaccagcctggccaacatggtgaaaccctgtctctactaaaaatacaaaattagccagttgtggtggctcacacctgtaattccagctactcaggaggctaaggcaggagaatcgcttgaatccaggaagcagaggttgcagtgaggcaagatcataccattgcactccagcctgggcaacaagagcaggactctgtctcaaaaaataaataaataaaataaaataatgttttattagaaaacattcttggttgatatgctgtagaaaaccaagtggcactccagaggaggcccacgagccactgcttgccagctcctgaccactgccctggggctgccattgtctaccatacccatttggtggaaacatgatgtcatggtgcactactctgcacctcctcccactcctcgctcagtgacctcccactctgagctgaaaatcagccatggcagaggcatttacccaacaggcactggcaaacactgcacaccaggactccctcttccagaatggcagtggttagacatttactgccacacacctactcagactgtacttttttggtttgtttgtttatattcataggttttagggtacaggtgatttttggttacatggataaattctttagtggtgatttctaagactttagtgcacttgtcacccaagcagtgtacactgtaccccatgtgtagtcttttatccctcacctccttccaaccttcaccccaaccacaagtccccagagtctattacatcattcttatgcctttgcatcatcatagcttagctctcacctgtaaatgagaacatacgacgtttggttttccatccctgagttacttagaataatggcctccagctccatccaagttgctgcaaaagacatcatttcattcttttttcatggctgagtagtattccatggtgtgtctataccacattttccttacccactctttggtcaatgggtacttaagtgggttccatatctttgcaattgtgaattgtgctgctataaacatgcatgtgaaagtgtctttttcacataaagacttcttttcctctgtgtagatgcccagtagtgggattgctggatcgaatggtagttccacctttagttcagaccccactttccagcctttccatgtgcgaaccttctctcaacagaatttgtatgacctctcattttgttttcatctgccagcgttgctcctttacatccaacagagttgaatgtagcttggataatctccgcatttcattacctttcttgcacagaacagaaagctcaggtggctggaacctggaggtggtaagcacaatgcttcactgaatgtctttatataaacagcccaccttgaggccgaaatccagcccgagaagacagtggctgtgagactcaggaaaccttctctaacgtcactggatctcagttcttcaccttgatgatgactggcagataaatgcacaaagtgtgagttagacaggagaaataagcattgaggtctattgcacagcagggtgactataactaataataacctattatttcaaagttgctaatggagtagatttttaacattctcactacaaaaatgattaaattggtgagatgatggatgtattaattagcttgattgatgccttctataatatacacataaatgaaaatattacattggaccctataaatatacacaattatatttttccaactaactttttttaaaatttgtatttcaaggagctgaatggaaatagttagagctcagtcgttattgtattccagttgatgacagccccaagagtgtgttggtttttgctgatgacttgggaggaagttcctgagcttggtgcaggtgtgctggccggaaagttggaaataatcccccgagtctctgctgtgaagactgagacatgagacagtggaatccaggaggtcctacaggtaccattttccccagaaccatggctcagcatttgtatctggcttctacaggttggaagactgcttggccacccctagaatttggactgatcttggcaataatcttcaaggtaacgggcatctaaagactctcatactaagaaaaaactccctggagaactgtggggcgtattacctgtctgtggcccagctggagaggctgtcgtaagtctcctttctagtggctgtggttgtggttgtggttgtggtggttgtttggtagatttagtgcttctgtgagaaaagaagtcatagggaaggtacatgtataggagcaaacataagtcttgtgattgatgtaattatatagataggtcaataagggtccagccaagaatgaaagagaaataacatatctacataaaagtacggatttatacctaatattctatatcaagcataatgagtcctatgtatccatcatcccgtttatgaaatagaactcatcagttctgttttcgcctgtcctcactggttttattgaccctgcccccgaccccactgtgatgacatattgaatcaggttgatcaggctccttaatttatgtatagtattaatattactacccgtgtatccttaaacaggcatcacatcg[136 bp omitted]accccatctctactaaaaatacaaaaattagccaggtgtggtggcacgcacctataatcccagctactcgggaggctgaggtaggagaatcccttgaacccaggaggctagaggttgcagtgagccgagatcgcaccactgcactccagcctgaatgacagagtgagactcgtctcaaaaaaaaaaaaaaaaaaaaggattttacataaaagtatcacctgtgatgtgttttttccctgatctatatcttagtgttcatctgtttagttgcttctatagttaattcctcttcactacagaatgatattgatacgaagatccaagaatttagttattcattctactcacagttgagatttgggctgtttctaattgttggctacacacagacacacacacacacgcacacacacacactgtgatgaacattctaagaaaagaattgcagggccttggtgagtgttcatcttcagttttagtaggtttgtttccagagtgtacgaattggccagagcaatgggtatgaaggtgctcctaactccagatccctatccaagtcttactattatcagtattgttgttactgttattgccaatctgttgggcaggaaatggtaccttatggttttaatttgcatttccttgattactagcgactatttttttatcatctgactgttcatcttagtttatctgatttgcatgtcttcccatgtatttaatgcgtctttccttttttataacttccgaaattatgtctcttcctcagccgtctccttgtctgctatttattctttgatggtctctttctcttctctcttaatcccatatatttattttctatgttttaattttttttttttttttttgagacagaatcttgctctgttgcccaggctggagtgcagtggtgtgatcttggctcactgcaagctctgcctccctgcttcaagtgattctcctgcctgagccttctgagtagctgggattacaggtgcctgccaccgcactcagctgctttttgtatttttagtagacacggggttttgccacgttggccaggctggtcttgaactcctgacctcaggtgatccacctgcctcgacctcccaaagtgctgggattacagatgtgagccactgcacctagtctttttttttttcaggttttaatttttatttcaataagttttggggaaacaggtggtgtctggttacataaataagctttttcgtggtgatttctgggatttttgcacgcccaacatccgagcagtgtacactgtacccaatgtgtagtcttttatcccttgccaccccccaccctttcccccaagtccccaaagtccagtctgtcattcttatgcctttgtgtcctcatagcttagctcccacatatgagtgagaacatacgacgtttggtttccattcctgagttacttcacttagaaaaatagtctccaattctacctgggttactgcaaatgccattattttgttcctttttatggctgagtagtattccatggtgtgtgtgtgtgtgtgtatgtgtgtgtgtgtgtgtgtgtgtgtgtgtgacattttctttatccacttgttgttttatgggcatttgggctggttccatattttcgcaactgcaaattgtgctgctataaacatgtgtgtgtaagtatctttttcatataatgacttcttttcctctgggtgaattcccagtagtgggatcgctgcatcaaatggtcactctacttttagttctttaaggaatctccacactgttttccacagtggctgtactagtttacatttccatcaacagtgtaaaagtgttcctttttcaccaacacctttctttttattgtttgattatagccattcttgcaggagtgaggtggtattgcattgaggtttcaatttgcagttccctgatacttagtcatgtcaagcatttttccatttgctttttggccatttgtgtatcttttaggaattgtctattcgtgtccttagcccactttttgatgggatttttttttcttgctgatttgttctttgtagattctgaatattagtcctttgtcagatgtatagattgtaaagattttctcccactctgtgggctgtctgttaactctgctgattatttcttttgctgtgcagaagctttttagtctatcagttttattgatccacaatgccttcatcccaccattcccacatcgaagctgctgtcctttccttgaaagcttggaagtcctgagtggtgatgacagaggtgtgaggatgcttctgcatccagagggagagccctgactgagaagatcacccttctgtgtgagacaaagacccctctccattcagtcatctgtgtgcttctctcccataggatagagaactgcaaccttacacagcttacttgtgaaagccttgcctcctgtctcaggcagagtaagatgctgacccacctgagcttggcagaaaacgccttgaaagatgaaggggccaagcatatttggaatgccctgccacacctgagatgtcctctgcagaggctggtgtaagtcccagaatgttttcttctctgaattccctggagcagaacagggtgatgaagagaacctgttatatattcatttatgtcacatatttattaagtgcctactgcgtgttaggcatggtgctagcactgaggggaaaagcacaataaagaggagggttattatttctgattcagggacaagtgatctagaggcagagttctcaaactgtgtaccaagacacccaggagtgaactcagaaggactgcagggtattttaaatttaaggaatattgagatctatctgttcatcactgtaagaacgactacctcgaggtgtaagaattaaagaaagaggaaagaaacacaaaaggtggcttgacagttaaggacaggtttattttagagaaaacagacctgagaggggcttctggccgagttaggtcagagctacactctcttatagactaagagtttttaaagattcagggtgggaatatttatcagaggcttggactgcttctgtgactcttggttgtgcttatctgggagggagagttgtgtgtctgttcccatacatccttctgcagctgcaggcatatcccctgagtctgcttttagcttccctatcttagtgcacctgaagggaaaggaatgtgctattaaggctcactgttttgggaggcctgtaatcccagcac[133 bp omitted]gaggcaggagaatggcatgaacccgggaggcagagcttacagtgagccaagatcgcaccactgcactccagcctgggcgacagagtgagactctgtctcaaaaaaaaaaaaaaagaaagaaaaaaggcccattgttttactggggctcgtggcatgaatgtgaagtttggcagttacccgagagactttccccccacctccctctgtgccctagctgtcttatctgtgttttactgtctgttctttctggctgcttgtaattaggagagaaatgatttccttgaaatgcatgaggttagaaagggagctggaacttaaagtgccagtgtctgtccgagatcacggtgctcctgctctgtcacgaggtagttcattttcacagcttgaaatcagccatggcagaagtgtttgcaccatggaaactggcaatcactacacatgagggcttttgtttgtttgctctagagagctggtttactaggacatcaccgaaccataaccatcgaatcccctctttatttcttgtctcacatgagaatatgagctgctaaaaggcaggggctctgcctgcgtgaattcccatcccctaattcaatgccccaagcatagtaactctcagcaaatgtttgtgaaaggcaagaggtggcgcaaaataccccctgaaacactgatactgttagttctccaaaaagaagcagggaacggtgccactgctttggaaagcagctttggcagttcctcaaaaggtgaagcacagacttaatccgtgagccatcagtcctgctagtaggtgtatccacaaaagaaataaaaacccacctccacatgaaaacctgcacacagttcacagcagcattattcatagtactcataatacccaagacctggaaacaacctgtgtctgtgccctgatgacggcataaaggcagtatggtgtattcacgcaatggaatgttatttaattgttaaatgaaatactgattcatgctacagcatggacgaatcttcaaaatattatggtagataaaagaagctaaacgcaaaaagtcacatattacatgattccatttaaatgacatgccaaaaataggcaaatccagaaaaagaaagcaaattagtggtgttagggttggggtgggttgggggaggaagtgagaagtggcttctaaagtatccagggttttccttaggggtgacaaaaatattccaaaccgaacttacacaaatattctaaaattgtggtgatgatcatacaactttataaatagactgaaaaccaatatttggtacactttaagtgggtgaattgtgtgatatattaattgcatcttggttatgccattatgcaaaaacaaaaaacaaacaaacaaaacaaacaaataaaaacagaacccaaaaacaaagaagtaaaacctaagggtgttttcgttgttgttgttgttgttgttttgttgtagttgttgttgttgttgtttttaacctgtgtttctttgcagactgagaaagtgtgacttgacctttaattgctgtcaggatatgatctctgcgctctgtaaaaataaaaccctgaaaagtcttgacctaagttttaatagcctgaaggatgatggggtgatcctgctgtgtgaggccctgaagaaccctgactgtacattacagatcctggagtaagtggcccctcgtctcctcctgtgagaccaggagaattgtatataagcgtctctcaggatggaatatataacaggaaagggctgtctttttaagtttctggattgttccctccattgaattggagaactgggaagcttctgagccgtggttctcaaagtgtggatcagcagcagtttcgcctgggcaggacacacacaaattttggggccccacttcggacctagggaaccagaaactctgagggtgggatgcagcaatctgtgttaacaattgttttaaaaaatattcttccagttgaataaaagataacaaagagtttgtcacttttagactgatatctgagatgactggtctgaaattgaattttacacttaggagatatatatatacacatatatgtatataaagatacatatataaatatatatgtatataaagatgtatctaaagatacatatatatgcatatatatgtatataaagatacatgtggccaggcgcggtggctcacgcctataatcccagcactttgggaggctgaggtggggcggatcatgagatcaggagatcgagactatcctggctaacacggtgaaaccatgtctgtactaaaaatacaaaaaattagctgggcgtggtggtgggcgcctctagtcccagctaatcgggaggctgaggcaggagaatggtgtgaacctgggaagtggagcttgcagtgagccgagatcacaccactgtactccagcctgggccacagagtgagactctgtctcaaaaaaaaaaaaagatacatatatacatatatatgtatataaagatacataagatacatatatacgtatatacgtatataaagatacataagatacatatatacatatatacgtatataaagatacataagatacatatatatatatatgtatataaagatacataagatatctgcatatgtgtacacatatatgtacagacacatatatacttattttataaatatttatatgtagatacttattttatatattatacatataagcaatatattatttatatataagtatatataaatatataaaataaatacgaatatattatatgtaaatatatgtaaatatacaatatattatacattatatacttacatattatgttgtatattatatatttatatatacataatttatattatataaatatatgtattatatatttatatataatattaaaatatatattaattatattaatatatttatatatgaaaatatataatgtatatatttccctgttttttgtggtctctttgctaacatgtataccagccagtgatataaaagcattcgttctgtttttaattctttggttaccttaagtatttggaaaagacttgtaaacatctcctctcatgatcaaaaaatgaatctaattttacctctttcaatccaaattttttgctctccattagcatagtcttggtatttaatctagctcatttaaattattgtcttgtagaacatctttcatttccaggattagtttggataatggtgttcatttttgttgatgatttgcttctcaaatgaaattcagtatgaattcactgccagtcatgattctttgatgcctcaaatctagtttgggttttaaatgttgatttatctcttagattgagtgaaatatattttcaggtagaaaagaactttctacacttgaaagtgtttatgcagtattttctaagcctttgcttgtatgagattattattatttttttcagatcacaaaattaattttatgtttccagtatacctgtggggctaacaagacagttatctgctttgggtccttttcatccacctgtcccctttgggtttgctgtttaatttaattttttttaaatttttttattatactttaagttttagaggggggagggatagcatttggagatatacgtaatgttaaatggcgagttactgagattattttttaatctagttttggtcatgagcagtaacttggctcagtgtaaaattcatggaccctatctgtcttagtctgttttctgctgcttataacagaatacctgaaattgcatgacgtataaagaaaaggactgtggaggctgagaagtccaaggtggaggggctgcatctggtgagagccttagtgctggggggattctctgcagggtcactagtgagtcactgagcatgctgtatactggctcagatctctttccctcttcttatacagccactcatcccactcccatgataacccgttaacccattaatctaataatccatgaattttactctttgttcaaggactcttatgggccggcatcgtatttatgatacacggcacctctttgagacatggtcacttatttgtagatgtgcctccccaacttttcagtgagtactgtgtgggagggcaaagtgacttacttatagaaggatttgagctgggtgtggtggcatgtgcctacagtcccagctgctagggaggctactaggtagtaggattgcttgagccaaggaatttgaagctacagtgagtcagggtcacaccactgcactccagcctgggcaacagagtgagactcagtctccaaaaaaaatttttttttaaaaagatccaaacacctggcccattaggacaataaaaccatgctatttgaatacatgtattttgttacctgtctcctccctcaataccctgcccagtcaactgtgagttacaggaaggcaaggatggtgtgtgttgctcactcttgtgtcaaaaatgtccactaggtagaatcaaatatcttttgaatgaatgaagataagtaggtacaagccattttcgaaagatatacttggctcataaattcttagagtgaggaatactatagcctgctctgaaatcaccaaaaggacacaaagaaactgattgactataggtgaatagaccatagttggaacaacattacacattcctgtcagtgtgatttcttggctgtaagccgtcacaccggctgagctctcagatgagttgtgatgacttctctgctgtctgctgtctgtttctgtgtcacaggctggaaaactgcctgttcacctccatctgctgccaggccatggcttccatgctccgcaaaaaccaacatctgagacatctggacttgagcaagaatgcgattggagtctatggtattctgaccttgtgcgaggccttctcaagccaaaagaagagagaagaggtcattttgtaagtctccaccgggtttcctgtgcaaaacctaccacacaagagaagctccttgtaaaacgtgagatgctgggctgggtgtagtggtgcatgcctgtaatcccagcactttgggagactgagacaggcagatcgcttgagtctggagttcagaccagcctgggcaacattgcaaaaccctgtcttctactaaaaaatagaaaaattaactaggcatggtggtgcatgcctgtagtcccagctactcaggaggctgaggtgagaggatcacttgggcccaggaggttgaggctacagtgagccatgatcacaccactgcactccagcctgggcaacagagtgagaccctgtctcttaaaatagaaagtgagattgtggacctggaatgctattgtttcaggtgttgctaccattctgcttttgtttcctggggatttatatttcccttaatgtagctgttcaaacccccaactcccacttttacctaaaggaaccattaactgggattctcctatctgatatcttctttcttgtctttgtcttctcttttcttcatttcttcaccttttcttcctgaacagctgagtttgttatcacttaccagctatatagccatgaacaagttaatctttctaagcctcaatttgctaatctataaaattgggatggtgtcttctcccatggagattttataatgactgaaagaaaagtcgcacatacggcacttaacacagtgcctaacacatgttctcaaccagtggtgggttctgggtgaaagatacaatttttcctggtgtatgagttgtctattgctatgcagtgaattacctcaacgcttagtaacttaaagccacataaaggcgtattgtcttacacaatttctgagggtcagaaatacgacagcgatgtaactgggaggttctagctcatggtatctcccgaggtctcagttgagccactggctggggtttgatgagggctgttgaatctgcttccaggctcacttgtgtggctgtgggcggcgggggggcctcagttgttctccagggagttgctcatgacattgcagctggcttcctccagaacgagaggctgagagaggcagaggcagagggagatggtggcagagagagatgactgacagctcaaaacagagccacagtcttttattacttaatcttgaaagtggcgtcccatcacgtctgccttgttttattggccatggtccagccctggtccagtgagagagggagccatccaagggtgtgatttgtaggaggagggatcatgggggctgtcttggttgaaccccaaggcactttgaattcattcctgagctcctaagagtgctcctatttgtcttgacctactgcatggggccatggtggtctcctaggtggtaaatttctgttctagaggttctgtctctttgttttggggctgcaaaagaaaaccaaatgtaagaaaacaaaaccttgtttttatccttcccagggagaagaaagacagcaatgaagtggatatgctggcaagactggagggccctgtagtggaaggagacttcctgaagataatacaggactggaattcttagtgctgtgatgaagcaatagagatgaatcgatctggaccctctggtgactgatctggtggccctctgggtattttttttttttcctaatgagaaattgggaaacagttgcctattttgtgggccgtcctgactctggaatggctccattcgttctgggaactggtgtagggcatgacctccaaatagctccatcaatgttatggagtgtcatgtgttaacacatagattagtcactgcattgggggcaccaaggtaaggtgagttccaacccacatctactcctggctaccagaatgtctttgaatatgtcatgtaaacatctcttggagatatgtcttcatatcttcaagggtattagaaaaatttaattaaaaatatgcatgaatgcaatttgaaattttttagagtgtgatttatttaccaatagactggtccatcaactgttaaggaagaaacctgttcttaacgtgtctggggaaagtgtgcacaaggaacttctaaggaagataataaatgtagcaagtactggaaaaaggaaatcacctcatgtttaaggagctctaaaaatgaagtgtaactcttaactttttaaggtcctaactaactactacattcttaaattagttatggcagcatttaaaactcaaagatctagaaagcaatcacaatgttttttttccccttctgaaacagccatctttttacaatgtaatgatcaggtatcatccaggttggtttctcttgttttttgtttttttttttgagatggagtctcactctgtcaccacactggagtgcagtggtgtaatctcggctcactgcaacctccacctcctagcttcaagtgattctcctgcctcagcctcctgagtaactgggactacaggtgtgcaccaccactcccagctaatttttttgtatttttagcagagacagggtttcaccacgttggccaggatggtcttgatctcttgacctcgtgatttgcctgccttggcctcccaaagtgctgggattacaagtgtgagccactatgcccggcccaggttgatttcttaattctgaagaaattttatttcaaaagccagagcagttggggtcttcaacctccaccctagcaatcccactgctaggtatataccccaaagaaatcagtaaatcagagagatatctgcacttccatgtttattgcagcactattcacaatagccaagatttggaagcacctaagtgtccatcaacagatgaatggataaagaaaatgtggtacttacgcacaatggagtactattcagccatgaaaaagaaacttaagtgtagaaacaatggtatcatagaaacagcacactggtgctcaggtattgttttctaagtaccgttcctcattaaaggaaccaagaatcttcagagaaagagctgactccacagttggtgctgggaatgtacagaatgggcttggaacatcttgtgccagaagtaagacaatgctcagagaacaatgggggccaggccagtggcttgcacctgtaatctcagcactgtgggaggttaaggtggagagttgcttgagcccaagagttagtgaccagcctgggcaacatagggagtccccatctacattaaaaaatgttttacaaatcacctgggcatgatggcgcatgcctgtggtcccagctatttggggggctgaagtgggaagatcacttgagcccagaatctcaaggctgcagtgagccatgatgcatcactgcactccagcctgggcaacagagtgagaccctgtctctgaaaaataataataataatggggacatagcaataggaacaaggagcctgattgaatgagttcccaccggccaaatctggaataatttaatgatcaaaccaaataatggtagaaatgtggatgacagtcgtgagaccttggttcttgtcttcatttaaaagaatttaaacaacagatacacagcaaaggagatgcagcatagggcaattgcaaaagaaaaagaatattttgaaagtaggccaggtgcggtggctcactcctgtaatcccagcattttgggaagctgaggcaggtggatcatctgaggtcaggagttcgagaccagcatggccaacgtggtaaaaccccatctctactaaaaatacaaaaattagccgggcgtggtggtgcatgcctgtagtcacaggtacttgggaggctgaggcaggagaatcacttgaacccaggaggtggaggttgcagtgagccaagattttgccactgcactacagcctgggtgacagaatgagactccatctcaaaaaaaaaaaaaaaaaaaaagcaaataaatgaaagacgaaatgtggtggtagagaaaccatcagaaggtgctgaaaccagtagatggagactcgatgtactcacatgagtctttaaggttctccccagaaactacatgtgaattacaaagtaagagtagtgggaaaacagggtagattgtgccttagccaagtactcaaagttaacatcaccaataagaagacaaatggatatcatgtgcctgtggatggaacgtgctgagataaacacagcagggcctcagtgacatgacagaacaagaacacaaagttggcaggaactatttcagattcaggaagaccaacctagtagatgcaaaaaaaaaaaaaaaaaaaaaaaaagataaaattcaacatcaatttgcaatttttaaaaaacacttggcaaacttggaaccgatggtgacttatttaatttgaggaagggcttctaaaaaattactgctaacatgcttattgttaatttaatctaatatttcactatttgtgaaaattctttccctaagataaaaatgagagcaaaaaacccaaccactattacaacttttatttaactttgcactggaggtcctagtcagtgtaacagggcaacaagaggaataataaacacaacattataaagatggaaataaaactgtcatttttcacaaacaatgtgattacatacatagaacaagaactgataatcctggtaaaccctggggattaaaaaataataattaaaaagtgaattagtaagatcccacacacaacaactcgatatatgaaaataaaatgtattactatgtactattaagcagtttttaaaagcataaaatttcttttatactggtgtcaataatctcaaataggaataaacaataacagttgtggccgggcgcagtggctcacgcctgtaatcacagcactttgggaggccgaagcggggggatcacctgaggtcaggaatttgagaccggcctggccaacatggagaaaccccgtctctactaaaaatacaaaattagccaggcgtggtggtgcatgcctgtggtcccagctacttttgaggctgaggcaggagaatcccttaaacctaggaggtggaggttgtgttgagccgagatcgcgccattgcactccagcctgggcaacaaaagcaaaacactgtctccaaaaaaaaaaaaaaaaaaacaacagttgtgccatggccaggcccagtggctcacgcctgtaatcccacccctttgggaggccaagtggggaggatcacttcagcccaggagttcgaggctgcagtaagccgtgcttgcaccactgcactccagcctgggcaacagagtgagaccctatctcaaaagaaaaaattaaagaatacctaataaatggagaaatatacaaacttcatgaatgggaacactgtctttcaaagatgacaattttccttggctgtatgcataaagttattgcaattaccataaaattcccaaagtactctagtggaaatttacaagcaaattctaaagtatatgaagaaatgtggccaagcgcggtggctcacgcctgtcatcccaacactttgggaggcccaggtgggcggatcacaaggtcaggagttcgagaccagcctgaccaatatggtgaaaccccgtctctactaaagatacaaaaaattagccaggcgtggtggcgggcgcctgtaatcccagctactagggaggttgaggcaggagaatcgcttgaactggggaggcggaggttgcagtgagctgagatcatgccattgcactccagcccaggtgacagtgtgagactctgtctcaaaaaaataaaaatgaaaaagaaaaaaaagaaatgcaaagagttcaggataactagcacagtatggtattttccatacatgtaattagagattggagaaatatactagggaaacagaatagagtccagaacagaagggcataaacatgatcacgtgacttctgacaagctgacattacaaaagactagggaaagggtagtattgtaacaaatggtgctaaattgattgttcctacatagaagaaaaaatctgaattcctacctcataccatatacaaaattaattccaagtatagtataaatctaaatatgaaaggaaagacactacactttctaaaaactaatcagaagaccttcatgacctaaggagagaccataaattttaaaatgcattcaccataa[144 bp omitted]tctattaaaaatctgaaaattagccgggcatggtggtacacacctgtagtcccagcttctcaggaggctgaggcaggagaattctttgaacccaggaggtggagtttgcactgagtactccagcctgggtcacagagcaagactccacatcaaaaaaaactaaaaataaatacatgggactttatcaaaagtataaacttctgtttcaagattactaagagagtacatttcaagtgttctcaccacaaaaaaataagtattcaaggcaatggatgtgtttgttagcttgatttaatcatttgacattgtatacatagaagatcacaccggaccccaggaaaatatacaattataatttgtcaatacacaaaaaattaaaaaatgccaagtgcaacttccagattatgtaaaataagggcacccaacacacactcacactcacacacacactctatcatacacagtctctcacacacacacactctctgtctcacacacattgtctcacacccactcacacagtctcacacacattctctcacacacatacacactgtctctgtctcacacattctctctctcacacacacatgcactctctctctcacacacacactctctcacatacacacacacacacacacacacacacacacacacactaattgcttcaggacagccagctgaaggctgtgagcatccgggcgccctcagcacaggtgtgtggtggtaaaggcagcctcttgccagcagcagcacctgtaagtggtgcacacaggtgcagaaaagtgcctgttccctggggctggtggttcagagccggttgcagccaatgagcagcagcaacatcactggctcagcgctccccaggaactatcgccacgtgggcgtggagctgggcgtggccttcttttttccgtgattgccagctggcccagagctggacctgctcttggtggtgaggtgtgaagctggtgagtattcctcctgtcttgctctctgcccttcccgcttttgttctccactgctgattagaacccgcgtattgagcttactaggtgcccccaccctctcccttctggctgctcaaagcccaggaccaaaggattccttgaaagaacaaagtccagttaccccattttgctgaaaagatcttcctctaaaacctcatatttacttggggtatttaggtaagtctctcgtccttttcagacattcggtctaaaatactgtacagagggctgggtgcagtggctcacgcctataatcccagcactttgggaggccgaggcaggtggatcatctgaggtcaggagttcaagaccagcctggccaacatggtgaaatcctcatctctaataaaagtacaaaaatgagctgggcgtggtggcatgtgcctataatcccaccttctagggaggctgagacgggagaatcgctttaacccaggaggcagaggttgcagtgagccaaggtcacgccactgcactccagcgtgggtgacagagtgagacttcgtctcaagtaaaaattaagtacagagtagggggtactgcaacttgaatgtcaggattagctaatgtctggtctgcatttggtaggagtccagagggtgttttggtgctaattgtgcaaatactatggttaaccgtaacttagttattgaaatgccatacaattctgacggtgttgtttgtcctgtttaccaagggaggaagctgagccccagataagttaaatggcttgcctggggtagaaagcagcaaatcattcaaagctgggtctgagacttcaagccctataatcttaactgctgctttctaatcattcaggacacctgggtagaaaggtgaggtgggaggggtacggtctgtagaaaaagcatagagacaaaatgcaagcttagggaagtcactcatcctcagaaaataacctcaaccagcagccttcctttacctccctccagctgtattcctgcctggactcgaataactagcttctccccaactcctcacccacccgacttcacgggaaaaagtgactgcctatcccagattaatccttaggccgtccagtcatctttctctggggcttgattgatcagttcccactctgacaactggcaaataccaggcgttatcatcctgtatgcattaacgtactttcccctgaaacagagcaacccagtcaacaccacagaacctcagctttgaaccctggagtgaggacggtgatgccctgtgtgtattaatatgctatgtaaggctgggcgtggtggctcacgcctgtaacccagcactatgggaggtcgaggtgggcagattacctgaggtcaggagttccagaccagcctggccaacatggtgaaaccccgcctctactaaaaaaaaaaatacaaaaaattaggcgtggtggtgggctcctgtaatcccagctgctcgggaggctgaggcaggagaatcacttgaatctaggaggcagagtttgcagtgagctgagatcacgccattgcactccagcctgggcgacagagcaagactctgtctcaagaagaaaaaaaaaatacatatacacataaatatatatatgtgtgtgtgtatatatatatatatatatatatatgctatataaagtttaaatgaaatgctttgagtcacctaagacaggatatagacaaagtcttcatcgtcttcttgcttcttctacctttatttattctcagctctgaatgtatgaacctgctcaatcacctcatcttaaaaataaaatcactgtccctagaccatactcgtttccttacccacccctgaggcttttgttggtttttacagccctggttcacgtcttggtcctccagcccctttaaaggattgtgtagagcggtaagggaaatgtttaattcaaattacgtgtatatagaagtgtttagatatgacagtccgaaattcgttctttctcaaataaccttccttcttaatttcattgcctaagttgagagtctttgtcttctgtgttttgctttcaatttccatgtatccaggtggtttatgttaactcagaagggggagaaaaacctagaaaatcttaattgttctgtggtcaggatgtaagcttttaaacatgtgctcagaaataagtatttttccatttaccaatagtcaatattgtccctaaatatttataggaatgtgtagaaaagcttattttcttgctatggttctattttgagcaatacagcacataaacttcaatgttctatcatcagtgttcacgtgtacctagttttttggtcttccatggatgggtaattgtaagaatacctcaattgttttgatgaaattcatttatgtctacttatcttctactaaaatgattttttaatgggaggtactttttagtatttggtgatttttggtgtgtatgtgttagacaaagtctccctcttttgcccaggctgtagtgcaatggctggatctctactcactgcaccctccgcctcccaggttcaagcaattctgcctcagcctcccgagtagctgggattacaggtgcccgccaccacgcccggctaattttcatatttttagtagagacggggtttccccatgttggccgggctggtctcgaactcctgacctcagatgatccacccacctcagcctcccaaagttctgggatgacaggcgtgagccactgcgcccggcctttttcagtattaatttgaaagagcagcaatatgagaaggtgtggcgggaagtgtgtccttccctgcccccgtagtgtctcttccctattttctgctcatcacccaaagacattctgcgcacgtgtatggcattaagagccttacagatggggcaactttctgtgctgattgttgtgcatttttaaggatgcagggcacgttggtgctcaaattaacccacctgtttttaatcgactcctaaatggtcttcagtcttgctgttttacacacggctgggtctaattgcatttaaaacggataaagattgttaaagtaccgtccaaaaagatggcacccatttacacttcactaatgtaggagcaccttttccttcacccatcacaaagcagcgtccagtcacacattgtggacattgtcagcctcacatgtcaaacgtagtacatcattttggctatttaccttatcagtaataacttttt[132 bp omitted]tgcaacctctgcctcccgggttcaagcgattctcctgcctcagcctcccgagtagctgggactacaggcacacgccacgatgcccggctaatttgtgtatttttagtagagatgcggtttcaccatgttgaccaggctagtctcgaactcctgacctcaggtgatccacctgcctcaggatcccaaagtgctgggattacaaaagtcatatgcagttttttaactcttcaaaatccttctaataggctgggcacagtggctcatgcctataatcccagcacttggggaggccgaggcaggtggatcatttgaggtcaggggtttgagaccagcctgactaacatggcgaaataccctgtctactaaaaatacaaaaattaggccgggcacggtg[167 bp omitted]gaggcaggagaatggcaggaacccgggaggcggagctggcagtgagccgagatggtgccactgcattccagcctgggcgacggagcaagactctgtctcaaaaagaaaaaaagctgggcatggttgagggtgtctgtaatcccagctactggggaggttgaggcaggagaatcacttgaacccaggagacggagattgcagtgaactgagatcatatcactgtactctagcctgggcaacaaaagcaaaactccatctcaaagaaaaaaaaaattccgctgagctgttgatcattatcatggattggaagagctgtttacgtaatgcattctttgtcatgtctcaaatttatttgcagcagttttttcagcgggactttaaagatttgtttgtttttctggagtgaggagggtactgtattgaattaatctgtcatcttgtctcttttataccattcgattgagaccttctattccatttgctcattatttgggggctaaatgtaaagtaggaattcatgaacataaatatttcaaaatttagcccccggaaatggtgaccttctatcgtagatgttaaagtgcagcctagacatcaacagagtgaatatcattcttcttagaattttcttgtctagttttggcttttcatagaaacattgagtttcttgtcctgataacaatatcagcagtacttcttggatgatattatactgatggaggatgactgatgtgttgggaatctgcctctgcctcaccacattgagccttttatctagcagccgcattttaaagctctcaaaacagatagccacttttctaaattatgcatgttttacctctatagttgctgttcatttgatctcacgtttaactggttattagattttgtgtgggatttcatcgttacatttgttaccagcccaatttaataactacatataatttaaaattgagtaatttattaggcatacatacctacatacagatgttaattttcacctttttccacttttatacctcctctttatctgattgctttcctatcaaatataaattaggtaaatataaataatagtggaatatcagatataaagaatagggagagagtacaaaactgaacggaagtgctgacagctaacattctttttttactttttagttttgggggtacatgtgaaggtttgttacgtaggtaaacttgtgtcatgggggtttgttatacatactatttcctcacccaggttattaagcccagtacccagtcgttatttctttctgcttctcaccctcctcccaccctccaccctcaggtagaccccagtatctgtggttcccctctttgtgtccatgtgttcttatttagctcccatttataagtgagaacatgtggtagttggttttctgttcctgtcttagtttgcttaggatgatggcccccagttccatccatgttcccacaaaagacatgatctcattcttttttatggctgcatagtattccatggtgtacgtgtaccacattttctttatccagtctgtccttgatgggcatttaggttgactccatgtcttttctattgtaaacagtgccacggtgaacatttgcatgcatgtatctttatgggagaatgctttatattcctcttagtgtatatacccagtgatgggatggctgggtccaacgctactgcttttagctctttgaggaatctccaccctgctttccacaatagctgaactgatttacactcccaccaacagtgtataagctttccattttttcctgcaacctcagcagcgtcggttttttgactttttaataatgacacgtaacattcttatgggattctctgtagggcttgtgtcaaatccagcccattgcccagttttgtaaataaagatttattggaacacagcttttctcctttgttgacaaattgtctacagctactttcccagtgcaggagcagctaagcacgggtggcagagagcaaatggccccaaagccaaaaatgcctggctccttctgggagatttgctgacccctgatctttgtcaaaaatagatacatttgctgcagtttttcctttattttagttgacacataactgtacatatttatggagactttttttttttgaaatgaattttcgctcttgttgcccaggctggagtgcaatggtgcaatcttggctcactgcaacctctgcctcccaggttcaagcgattctcctgcctcagcctcttgagtagctgggattacgggcacctgccaccatgcctggctaattttgtatttttagtagagatggggtttct[131 bp omitted]gtatcatgatcaaatcaggggacttagcatattcatcaccccaaacatttgtgttgtgaacactctgtcctcccttctagctttttgagagtggacaataagttatagttcaccatattcacctgcagtgctgcagaacacctgcacccatttctcccttctacctgtaatcttagcacccatgagccatactctccccctcctctccccctcctctccccctcctctccccctcctctccccctcctctccccctcctctccccctcctctcccccctctctcccccctctctcccccctccctccccctctcccccctcccctcctctcccccctcccctcccccctcccctccccccctcccctccccctccccctccccctccccctcctctcccctcctctcctcccccctcctcctctcaacctcccctctcccctctccctcctctcccctatcctctaatacccacaattacatcccctacttccatagtcccatttgctcaatttaactcccacatatgagtaaaatacattcagtatttagtttcccatgcctggtttattttgcttcacacaatgaactacaggctgtagctcacatgaagagctacaggctcatctgtgttgtcacaaatggcaggattttttgaaggctgaaacatgttcccttgtgtgtgtataccacgttttcttgattcatttgttgatggacagttaggtagattacatatcttagctatcgtgaatagtggggtggtaaacatgagagtgcagacatacctttgatatacttcgggtaaatcaccagatcgctggatcatagggtattaatctattttcagttctttgagacactgctacactgttttccataatggctgtgctaatttacatttccactgacagtggaaaggagtttctttctctgcatccttgccagcatttatttttcgtcttttttgatagtagccattccaactagagggaaatgcaaatcaaaaccacagtgagattgcgatgatgagtaatgttgaatcttttttcgtatctgttggtcatttggatgtcttttgagaaatgtctgttcaggtttttacccacttcttaaatggattacttggagttttgctatacagttgtttgagttcctcatatattctgggtattagttccttgccagatcattattttgcaaatattttctcccattctgcggggtttttttgggaggggggacagagtcttgttctgtcaccaggctggagtgcagtggcaccatctcagctcactgtaacctccaactccctagttcaagcgattctcctgcctcagcctccccagtagctgggatttcaggcacgtgccaccacacccagctaatttttgtatttctagtagagatggagtttcaccatgttggccaggatggtctcgatctcctgacctcatgatccacctgccttggcctcccaaagtgctggagttacaggcctgagccactgtgcccagccaggttgtctctttactcttggactatttcctttgctgtacagaagctctttagttggatgtactcctattggtctatttttgcttttgttgcctgtccttttgaagtcttagccgcaaaatatttgccttgacttgtattcagaagagctttccctatgttttcttctggtagttttattatttcaagtcttatgtttaagtactttatcttgagttgatttttatatatggtgagagacaggggtctagtttaattctgcatatggttatcccgttttcgcagtaccacctagtgaacacagtgtactttccctaatcttggtgcctttgaaaatgagttggatgagttcatgctctttgtagggacatggatgaagctggaaactatcattctgagcaaactatcgcaaggacagaaaaccaaacaccacatgttctcactcataggtgggaattgaacaatgagaacacttggacacagggtggggaacatcacacactggggcctgtcctagggtgtggggctgggggagggatagcattaggagaaatacctaatgcaaacgatgagttcatgggtgcagcaaaccaacatggcacatgtatacctgtgtaacaaacctgcacgttgtgcacatgtaccctagaacttaaagtattaaaaaaacttaaatattaaaatattctaacaagtcctgaaaaatacattaaaaaagaaagagttggctataaatatatggatttctgaattatctattctgttggtctatgtctgttttcatgacagtgccatgctgttttggttactatagctttgtgaagtcaggtaatatgcctccagctttctttttgctcaaaattgtttgggctacttgggatcttttgtggttctatacaaatattaggattgtttttctatttctgtgaagaatgtcgttggtgttttgatagggattgcattgaatctgtagattgttttgggtaggatggccattttaacaacattcttctaatcagtgaacgttagatgtctccatttttatctatcctcttcaatttttttcagtattctgtgggttttactatagatatttcttacctccttagttaaatttatttctaggtacatttttgtagctattataaaggacattgctttctttttcagctagttcattattggtgtttagaaatgctactgtttttatgttgatttttgcatcatactgagttcatttattatataaaaacttgcatcatactgaaaaatttatccaaaaatcaacatttttgtatgttgattctgcaactttactgaattcctttatcagttctctgtcttttggtggggtctgtaggcttttctaaatgaaagattatattgcctgcaaacatgaacaatctacttcttctccaattttgatgccctttgtttctttttcttccctaattgctctggctaagacttccagtactgtgttaaataggagtggcggaagtgggcaccctgtgtgccagttcttagggaaaaggctttcttcttttccacattcagtataatgctagctgtgggtttgtcatacatggcctttattgttctgagttatgtttcttctgcgtcttatcataaagggatgttgaatttttttttctttgttcatcttttcttttatactttaagttctagggtacatgtgcacaacgtgcaggtttgttacatatgtatacatgtgccctgttggtgtgctgcacccattaactcatcatttacattaggtatatctcctaatgctccctcccccacaacagtccccggtgtgtgacgttccccttcctgtgttcaagtgttctcattgttcagttcccacctatgagtgagaacatgtggtgtttggtttttcgtccttgcgatagtttgctcagaatgatgatttccagcttcatccatgtccctacaaggacatgaaatcatccttgtttatggctgcatagtattccatggtgtatatgtaccacattttcttaatccagtctatcactgatggacatttgggttggttccaagtctttgctattgtgaatagtgccacaataaacatacgtgtgcatgtgtctttatagcaacatgatttataatcctttaggtatatacccagtaatgagatggctggatcaaatggtatttctagttctagatccctgaggaatcgccacactgacttccacaatggttgaactagtttacagtcccaccaacagcgtaaaagtgtttctatttctccacatcctctctagcacctgttgtttcctgactttttaatgatcaccattctaactggtgtgggatggtatctcattgtggttttgatttgcatttctctgatggccagtgatgatgagcattttttcttgtatctgttggctatataaatatcttcttttgagaagtgtctgttcatatcctttgcccactttttgatggggttgtttgttttttttcttgtaaatgttgattttatcaaatgctttttctgcatgtcttgatgatcgtgtggtttttgtccttcagtctgctgatgaaccacccttgcaaccctgagatgaatcccacttcatcatggggaatgatctttttgatgtgttcttagatttggttacctagaattttgtcaaagatttttgtatctatgttcatgagagacgttggcctgtagttttcttttttgtgtgtccttttctggttttggtatcaggacaatgcttggctcatagaatgaggaagaattccctccccttcaattctcggaatagtttgagaagaattggtataagttctgtaaaagtttaaaaggtagctgggcatggtggctcatacctgtaatcccagcactctgggaagccaaggtggacagattacttgaggacaggagttagagaccagcctagccaacatggtaaaaccccatctctaccaaaaataccaaaataccaaaaattctggttaaaataccaaaaaaatagctgggtgtggtggctggcacctgtaatttcagctacttgggaggttgaggcaggaggatcacttgaccccagaaggcagcagttgcagtgagctgagattgcaccactgcagtccagcctgggtgacagagcaacactctatctcaaaaaaaaaaattaatttgaaggatatctagtcctggtttgtaaagtgtttctgttgatactatttatacatccattgaagctatatatttttttattctctgaatgttgaaggtagggagcaggaagtactatctactcttataaatggttttatcataatcaaaataatcaaaacaaccatggtagcatacacacacacagaaaacatcttttcctggagggtaggtaggttaatgaaaaccttgcctcttttaatgaaattaagtaggaattccaaagattggattagatttatcttatctcagtcctgaatttcagacattctaaaattataaaaatataagaaaccaggtgtggggtgtgcacctgtagtcccagctacttggggagtctgaggcaggaagatcacttgagcccaggagttcaaggctatatggtgagctatgatagtcaccacactccagcct[149 bp omitted]gtctctactaaaaatacagaaaattagccgggcatggtgacaggtgcctgaaatcccagctactctggaggctgagacaggagaattgcttgaacccgggaggtggaggttgcagtgagttgagattgtgccactgtactccagcccgggcgacaatgcaagccttcgtctcaaaatatgtgtgtgtgtgtgtatatatatatatatatatatatatatatatgtgtgtgtgtgtatatatatatatatgtgtatatatatatacacacactttagcctcacctgcagattcacaaattgaagcaatcctaaatccacttttatttttaattgacaataattgtatatatttgcgaggtacaatgcgatgtttagatatatgtatacatggcagaaaaaagctaacatgtccattgccttagttactttttgtggtgaggatgtttaaaatctacttttagcaattttggagcatatattaatacatcttttcttaaattccatggcaggttaaatacatcattattaactctagttgccatgctgtgcaggggatccctaaaactcatttctctgactgaaacttgtttgtaccttttcatcaatatttcctttttccccattttatcccccagtctctggcaaccaccattcttctctctgctgctatgaatttaattgttttagaatccacacaattgagatcctactaaatctttttttttctttttcttttttttttttttttttggagacagagttttgctcttgttgcccaagctggagtgcaatgccacaatcttggctcactgcaacctctgcctcccaggttcaagtgattcttctgcctcagcctcccgagtagctggggttacaggtgcgcgccaccatgcctggctaattttttgtatttttagtagaaatggggtttcaccatgttagccaggctggtctcgaccccctgacctcaggtgatctgcccgcctcggcagtagcgtcgtaagcctgagcgcttgtgtaccgtgacatactcttctgctcaggacgtctcggtctggcaggtagctttagagcaggtggtgttcagggttcccatgcatgctctgtgccagcccttccgaccggctcacttgttgcttcactgaaacctcacagtaacccttgaagaggcaggtactctgatttccagcttccagaggagagcccagccttcgatgttcagttactttccatggcgatgttatcatgaaggttgcaggaggacttgaacttggagctgctgctctgctctcagcatcaccacgtgcgtcgacagcctcttagagttacctatgaggaaaccgaccctcagccttggtaccatgacacacggatcgaatcccctgccctcgctgctgtctgctgcaatgttattagcaatccgttgcagcagaacactccccggggtagaaagaaagtgaaagaatgcaggaaaaagcctattacttctccagggaggtggtcaacccatgacagttgtccagggactgccacctccccactcttttcaatgacagttgtccagggactgccacctctccactcttttcaatgacagttgtccagggactgccacctctccactcttttcaatgacagttgtccagggacggccacctctccactcttctcaatgacagttgcccaggcatggccacctctccgctcttctcaatgacagttgtccgaggactgccacctctccactcttttcaatgacaattgtccagggactgctacctcgccactcttttcagaggcccttcctgtatagaggatattcatgataacatgtttcctgtgtcccaggggaaaacgtgtacccacatatatcacctcatgtttttttttgtttgtttttttaagacagagtctcattctgtcacccaggctggagtgcagtggcacgatcttgactcactgcaagctccgactcccgggttcacaccattctcctgcctcagcctccctagtagctgggactacaggcgcccgccac[131 bp omitted]cactgcgctcagccacctcatcttgtaaagcatattaaattactaaatcagaacagggttagaaatattcaaacttggtcgggtgtggtggctcacgcctataatctcagcactttgggaggccgaggctggtggatcatgaggtcaagagatagagaccatcctggccaacatggtgaaaccctgtctctactaaaaacacaaaaattagccaggcctggtggtgcacgcctgtaatcccagctacttgggaggctgaggcaggagaatcgattgaacccaggaagcagaggtttgcagcaagtagagatcatgccactacactccagcctgggtgacagagtgagactctatcaaaaagaaaaaaagaagaagaaaatattcaaatttggctgggcgcagtagctcatgcctgtaatcccaacactttgggaggccaggggtaagaggattacttgagcccaggagtttgaaaccagcctgggcaacatagtgacaccttgtctctactttttttttttttttaaaggcctggtgcagtgatgcaagcctgtggtcgcagctactaggaaggctgaggtgggaagcttgcttcagcccaggagttcgaggctgcagtgagctgtgactgcaccactgcactccagcctgggcaacagcaagactcagtcatttaaaaaaaaaaacaaacaaaaaacaccacagcttattgaatagattttagctaccatgacatttctaggctcttgtctcccacctctaccctcctttaaatattttcttctgactctcctaattacttgaaattttataatttatcttctgactctcctaattacttgaagtaatctcagcaagcccatcttaaaactttcccatggaaagaatggtaggcagaaggaaagacgggggctaaatactggggacaactttgtccctgcaggtcaagggagtataaagcaggtgccctgtctaagcaagcagagccaaaaatccgtgttaacagaaaccctacaggctgatttttactttggtgggatgcttccagttccagggaggtgacatgacaagactttactgtgtatctgcaagtttagctcaaaaactataaatgtacagatgtcaagcaagggtgatctcacaccaataccgcccctcagacaatgacaagctgctgtctacctgagtctttaaaatgttttattacatggtattccttcgattgctttgtcatctaccacaaagtaatggtggggggaaaggagatttgctcaaactggccaaccagtactggctgtcactatttatagggctcttataatgacaagaaaaaaggaaatttgagagatttaggaattattcctggggccttataacaactgctacatttcaatgtcatcatagaccaggcttctagacaactcggggaggtaattgatagcagaggtcctggacgtgcacctataaaatgagttagcaggtagggatagaattggtcctgatggtgatttacgacattaatcttttcatgtgctcattagccatttgcatagcttctttggagaaatggatattcagaccctttgcccatattaaattggatcgtctcccttttagtgtatgtatattatctagatataaatcccttatcagatatgacttttaagtattcagcagtttatttttacaccaaaactgtttactgtgtttatggaacctgatgttaacaggtgtaacagaaatcaactgatctaagaaccctgtaactggttattagtaactggtaggaatctatttgccagaggtttttttttttaattttattattattatactttaagttttagggtacatatgcacaacgtgcaggtttgttacatatgtatacacgtgccatgttggtgtgctgcacccattaactcatcatttagcattaggtatatctcctaatgctatcgctcccccctcccccaaccccacaacagtccctggtgtgtgatgttccccttcctgtgtccaagtgtactcattgttcaattcccacctatgagtgagaacatgcagtgtttggctttttgtccttgcgatagtttgctgagaatgatggtttccagtttcatccatgtccctacaaaggacatgaactcatccttttttatggctgcatagtattccatggtgtatatgtgccacattttcttaatccagtctattgctgttggacatttaggttggttccaagtctttgctattgtgaatagtgccgctataaactagaatggcgatcattaaaaagtcaggaaacaacaggtgctggagaggatgtggagaaataggaacacttttacactgttggtgggaccgtaaactagttcagccattgtggaagtcagtgtggcaattcctcagggatctagaactagaaataccatttgacccagccatcccattactgggtatataccctaaggattataaatcatgctgctataaagacacatgccagtggttttttgttttttgagatggagtttcactcttgtccaggctggagtgcaatgatgcagtcttggctcactgcaaccttcgccttccagattcaagcgattctcctgcctcagcctcctgagtagctgggattacaggcatgtgccaccactcctggctaatttttttatatttttaatagagatggagtttcaccatgtt[134 bp omitted]atctgtggcatgcacgtccaattttattctaagatgctgtttgggaactaagggtacagacaacaaaatgtcccagcactgatgtctagtaataggataaacagatattgtggcaacaaatgcttcgtccatgaagaattgaaaagagaaggccgttcatctagtgaggtgattgatgttagttgtatctacttgagaatttgctgcaagatcctcttttaagtcttgtcactctttccacaggtcctacttgctctatattaccaaagaatccacttttcccccaaaacctgagctctcagccttgtatcaagatggaaggagacaaatcgctcaccttttccagctacgggctgcaatggtgtctctatgagctagacaaggaagaatttcagacattcaaggaattactaaagaagaaatcttcagaatcgaccacatgctctattccacagtttgaaatcgagaatgccaacgtggaatgtctggcactcctcttgcatgagtattatggagcatcgctggcctgggctacgtccattagcatctttgaaaacatgaacctgcgaaccctctcggagaaggcacgggatgacatgaaaagtaagcgagacttgggacaagtctagggcagggaggggaggtgatttcaggttctcatgggaacagggaagaatcgttgttcagtaaccggctccacctctgcagtgtgagtctgagctgtgagaaggatcctattggtcatcgtcattggttggaaattagtgtagtctctagcctgtaaaataatggaggagggagaaatgggtagacaacggctccacccacatggacttcattgaagttaataggatttgggttgtaagtgctaagcttgagctctggcgctatcacgggtcggttgtgagacttcgggcatgtctccttctgttctgacccttggatcccacatcttggaacaggaaatgtgttactgtgtgtgccattgcaaaagttcaataatgtgtaatgcataggaagtggctaagaacctcattggttgataacattggtagtggtttggtgcgagtctcgtgcttggccgtgggatgaaggactgaggttccaggtgctcatctgaggcttggactttcttgggctattggtgtccgtagtgcagcaagaattcggatcagattctatgattattttagggtacttaggagaaaggtcatttagaaaatagcagttcttttttatctagagaatctctccaactgtagactgaaaacaaatcccttgactgagcccttgaattggccctacaaatacaggtgtgggctggatgcagtgactcatggctgtgatcccagcactttgggaggctgaggtgggtggatcacctgaggtcaagagatcgagaccagcctggccaacatggagaaaccccgtctctactagaaatacaaaaaattagccaggcgtcatggcacatgcctgtaatcccagctactcaggagactgaggcaggagaatcacttgaatccgggaggcagaggttgcagtgagccgagattatgccactgcactccagcctgggcaacggagtgagactgtgtctcaaaaaaaaaaaaaaatatatatatatatatataatatatacacacacacatatatacacacacatatacacatatatttttatatatacacacatatttttatatacacatacacatacacacatatacacatatatttttatatatacacacatatatatttatatatacacatacacatatacacatatatttttatatatacacatatatatttatatatacacacatatttatatatacacatacacatacacatatatttttatatacacacatatatatttatatatacatatacacacacatatacacatatatttttatatatacacatatttatatatacacatatatttttatatacacacacacatatttatacacacacacacgcaggtggcatgcctgtacacatatatatttatacacacacacgcacacacgcaggtggcatgcctgtacacacatatatatttatacacacacgcacacacgcaggtggcatgcctgtacacacatatatatttatacacacacacacacacacgcgcgcaggtggcatgcctgcacatccgtgacctggatgcagctcagcagcattagctgcaaaacgcttcaagggctctctctcctgagcttggaaaaaaggcccagtgtggagggcatgtgggtattattcccaggaagagagtgcataaaaatgagagctagggtttatcaagtcagcactgcactgaaactgtcatgtccccaccatctgactctcaaccccacccagtgaaatgggttccctatggctgaagctgtgatagaggatcttacaagatacataacttgaccaacttcatgggctaataagtggcaaagatgagattgattgtttaacattcatctaccgtggcatatgtttaaattctcatatgtctggtgtcagagatttgcagttttccatgaggtagagagaaagaaatgggcaactttaaaaatgaatgatagccataaaaaaggatgagttcatgtcctttatagggacatggatgaagatggaaaccatcattctcagcaaactatcacaaggacagaaaaccaaacaccgcatgttgtcactcataggtgggaattgaacaatgaaaacgcttggacacaggaaggggaacatcacacaccggggtctgttgtggggtgggggaagtggggagtgatagcattaggagatatacctaatgtaaataacgagttaatgggtgcagcacaccaacatagcacatgtatacatatgtaacaaacctgcacattgtgcacatgtaccctagaacttaaagtataattttaaaaaaaaaatggatggtataggccaggtgggtgtggctaatgcctgtaatcccagcactctgggaggccaaggtgggtggatcatttgaggtcaggagtttgagaccagcctggccaacatggtgaaacactgtctctactaaaaatacaaaaattagccaggcatggtggcacacacctgtaatcccagctacttgggaggctgaggcaggagaatcacttgaacccgggaggtagaggttgcagtgagtcaagatcgcgccactgcactccagcctgggtgacagagcga[132 bp omitted]cttcagcctcctgagtagctgagactacaggtgcccgccagcactcctggctaattttttgtatttttagtagagaaggggtttcaccttgttagccaggatggtctcgatctcccgaccttgtgatccacccaccttggcctcccaaagttctgggattacaggtgtgagccactgtgcctggcctaaaataaaattttttaaaaattgtatataaaaatgtcttatggctgggcaccgtggctcacgcctgtaatcccaatactttgagagtcctaggcgggcggatcacttgaggtcaggagttcaagactagcctgtctaacacggtaaaaccctgtctctactaaaaatacaaaaaattagcctggtgtagtggcaggcacctgtaatcccagctactaggtaggctgaggcaggagaatcgcttgaagctgggaggcagaggttgcagtgagctgagattgtgccgttgcactccagcctgggcgacagattgagactgtcttttttttttttatagaaagtcttacagttcctattccagatgagagggaagtttagaatcacttcctagaaggagtaagctttaggctgagataaacaaagaagaggagttggcggagttgcctgagcatggtagagaaaaacattctgagcataaagtcagggcatcccaaagcctttaacagagggtttggctgggccacggagaatgagcaggaggtgaagacggagggactagaagtcagataacatggcatcttgaaaatacttgtaatagcaagtagaagcaattacatagtttgaaaggggtggtaatagaaatcatcaaactttcctttcagcactgttgcaaaagtgttgagtgacccagaggggattgtggaataaacacagggagacgagtttgaggtctttctactgtccatgagataaataaaggtggcttggaataggatgatggcacagaaagaagtagaaatggaagatgcttccaaagtgtacaagacagtttgtgtgtgtgtgtgtgtgtgcgcgtgcgcgcgtgcgtgtgtgtgtgtgtgtgtgtgtgtgtgtgtttgaaacagagtcttgctctgtcgcccaggctgggctgtcgcccagtgcagtggcgcgatctcggctcactgcaaactccgcctcccgggttcgtgccattctcctgcctc[224 bp omitted]agtgtcatgggtgatccccaagtttctggcatgataaactgggtggatggggttccatggcctcaccccatggaagagatgttttgcaaaaagtagattgggggatgggtagtcaatcttggaccttgtaagttgttgaaggtacctgtatttgggtaactcataggcatctagtgagtcattgactaactgggtctggagttcaagacaggtcttgaggaggactcctgaaaagaaacttaatcaccacaattaacctcattgtgtgacttacccaaggccatccagcaaaacggccagagaattcttcacaaacctctgtttcttcagtgtgcttctgctggctcaggaaagtctgactttgttgtctccgttataggccaatcatggaataaactgagatcctgaggtttgtcttggttcccctccataatttggacacgggacattcttatccttggcttgggtaattacagtgacttcattgaggccagtctccctttttctttgtcttccaggacattcaccagaagatcctgaagcaacgatgactgaccaaggaccaagcaaggaaaaagtgccaggttagaggggtggagttgggggaaataggatgtgcttaaagacacatggcagccagtttgcatctctaggcattagaaccatgacttctgatagtctagtgttctttctagtctaactaccctacattagctgaccggatgggttctgaggatctggtaattctggtatttctctttccaagttgaagagttctgtggcctggggccaggtctagtggctcatgcctgtaatcccagtactttgggaggctgaggtgggcagatcacctgaggtcaggagttcaagaccagcctggccaacatggtgaaacgtcgtctctactaaaaatacaaaaaaatagccagacgtggtggtgggtgcctgtaatcccagctacttgggaggtggaggcaggagaatcacttggacccggtaggcagaggttgcagtgagccgagatcacaccactgcactccagcctgggcgacagaacgagactccatctcaaaaaaaaaaaaaaaaaaaagagttctgtggtcttcaggctttcttacaacttgaggacttcccatcgtcttcagtttgggtaaccttatgaccccactatgacaagctcctcccaataacccagtaggaggctttggtggaaagaatcagatagcatgaaaccagattcaatacaattccccaaacattagagcactgacctcatgccagccactgctctgcgtatttacaatacatcgttggccaaagcatacgtgttcatgaaattcacacattgtgggacaggaaagacaaaccaaaaaactaagatgacacaagggaaggcaaaacacacagggagaaaggcaggctgcatagacaccatgaattctcctctgctacctgcgccgctaccatcttgctcagctcccagcagccagtgttgaccgtgaaacctaatctggtttggaaggggttgaagccaacctcgttttgatggagctttgctcaggctgtgggtggggaaagagctcttcaaagctaacatctgagtaactggcatctgaatcagaggctctgaatcccaaaggttctactttgctcagagtttgatgtcaatctaggcttcaccgggtgagtgtgacatgttatccttcatgtgataagactgcgtctcagaggttttataagttaccaaatggtggcttagagcgtaaaataaacacacagagtaaccttgatagtaggactgaaacaaacctgacaaaagccgggggtcttgccatcagccacgttaggagatccctctgagctgctcctggacacgagaactaccacttcttgagaccacttggatcacgcaccgtgccagtgctttagtccatgcttctcaatcctctgtggtactggctgtcgttagtcatgcagcgagacccagaagctcaatgcacaccaaagtctcacatggttaaattgaggcaaggtgggcttgtgccagaaagacctgactgcaggtgttatccacgtacaaagatgaaggccatcagagacagacactctaccctcaaggagcttacatcataggggatcacaggccttcgt[144 bp omitted]agacaccccatgtctactaaaaatacaggaaaaaaaaaactagccaggcgtggtggcatgtgcccgtaatcctagctactcaagaggctgaggcaggagaatcacttgaacccaggaggtagaggttgtggtgagccactgcactccagcctgggaaacaagagcttaactctgtctcaaaaaaaaaaaaagtcccttgaaactaagccaacccaataaatgcagttttttttttatcaagctatagaatcaaatgtggtccatgtatacaatagtatattatttggcataaaaaggaatgatgtggctggacacagtgactcatacctgtaatcccagcactttgggaggctgaggcaggcagattgctcgaacccaggagttcgagaccaacctgggcaatgtagcaagacccgacgtctaccaaaagaattaaaattagctgagtgtgggagtgtgcacgtatagtcccagctacttgggaagctgaggcaggaggattgcttgagtccaggggggttgaggctgcattgagccatgattgtgtcactgcacttcagcctgggtgataaaatgagactatgtctttaaaaaatatatatacacacatacattaatgtatgctacaagatggatggaccttgaagacactaggctaagtgaaggaaaccatcacaaaaagatatatattgaatgattccattcatataaaatgtctagaatcggcaaatccatttaaatactagattagtggttgcctagggctggggtgaatggggaaacttagagggtgaggactaagagggcagggtttttctcgttgagggtgattaagatgttctaaaattgtactgatggttacaatgtgaatattctcaatcatgattgcacactttcaatgggtgaattgtatgatttgtgaaatttatttctgtaaatctattacaaaactctagagaagacaataagatacatccatccgaagtcagcatcgtacgtatgacgactacaaagcccagagagacagatttgcccaaagaagatcagccaacagaaagcctgattttttttttctttccagactgagatgtcatctttgtgttagatcttttttcttttcctatgtcttttttttttttctttcccgcctagatagtctcgctctgtcacccaggctggagtgcaatggcttgatcttggctcactgcaacctctgcctcccaggttcaagcgattctcctgtctgcctcccaagtagctgggattacacacgcgcgccaccgtgcctggctaatttttgtgtatttggtaaagatggagtttcaccgtattggtcaggctggcctagaattcctgacctcaggtgatccacccacctcagcctcccaaactgctaggattacaggcatgagccaccgcacccagcctagatcttataaattctatgtaagttcagattctttcatctcttacatggtgaatctatttagtctaatagattgaatgtattatgatgctcaagacatagctcctaatataaatccacccccacaag[139 bp omitted]ctgcctcagcctcccaagtagctgggactataggcacctgccaccatgtccggctaattttttgtatttttagtagagatggggtttcaccatgttggccaggctgccttcgaactcctgacctcgtgatccacctgccttggcctcccaaagtgctgagattacaggcatgagccactgcgccttggcctttttttttttttttttccggataactcgatgcaggtttacatatcgtaaaatcttgagaatacaattcgaaaatttataaacatgaacctattaccataatccagtcttaggacatttccataacccaaaaaaaaaaaaaaatccttcagcagagacaacaagatggagaaaattggcctgtcttacttttgcataatttggaacgatcttacaattattttccttggaacgatcttacaattattttcccagaacctgatattgtaatgaatgacacttacagacttctttcaagtgttaaactgctgttgctttcctggaatacctgtgatataagcaccattacatacctttgatacacttctgatacagtttgctgataagtcacttcaaatttggcgtctgtgtttgagtgaactggtctgtaatctctttatatactttccttgcttttttaaagttgagagaaaattcatatatcataaaattcatcttaatacaattcagtgttttattgtattaacaaagttgtgtaaccatcactgctacctaatttcaggaaattttcatcaccccagaaaaccacatacctattagccatcactccccatacccagcccctggaaaccagtcatccactttgtgtctgtgaattttgccttttctggactttgcatataaatgaaatcagacactttgttatattgtgtgactggctttcttcatttaacataatgtttttgttttttgtttttgttttgagatggagtcgtgctctgttgctgaggctggagtgcagtggtgcgatctcggctcactgcaacctccgcctccctggttcacgctattttcctgcctcagcctcctgagtagctgggactacaggtgcctaccactacacccagctaattttttgtattttcagtagagacggggtttcacagtgttagccaaaattgtctcgatatcctgaccttgtgatctgcccacctcagcctcccaaagtgctgggattttaacataatgttttaaagatttgtcaatatcatagcctgtctcaggacttcataactttttatggctgaacagtattccttttatatatataccgcttcttgttcatttatcacatgatggacatttgggtttttttttttttttttttttgctattatgaacgatgcagctatggattcccacgtgtgtgtttgtgtagatgtgtttttgattcagggaggcctatacctaggagtggaagtggtgggtcatatggcaactgtgtttaactttttgaggagctctgccaaatggtttttcttgagtgactgcaccattttgcatcctcaccaacaccttaatgaaagctacagtaacgtttgctccactatttttcattgtaaccatcctagtagttatgaaacattgactgtggttttgatttgaatttccctaattatgttcagaatcttttcgtgtgcttattggctacttctgtgtctttagagaaatgtatattcaaatccttggtccttttttaacttcattatattgttgacttgcaatacttaggttttatcatctagattatgtagagacataattttatatattcccctgttctctgagttgtcttttcacattgctgatactgtcctttgaagcacagcgggcttttattttacaagacaaatttatttccttgattgtttgtgcttttggtgttatatctttaaaaaaattgtttaacccagctgggtacggtggcttacacctgtaatcccagcactttgggaggccaaggcggtggatcacaagatcaggatatccagaccctcctggccaacatggtgaaaccctgtctctactaaaatacaaaaaaatccaccaggcatggtggcgctttcctgtagtcccagctccttgagagagtgaggcaggggaatcgcttgaacccaggaggtggaggttccagtgaaccaagatcgtgccattgcactccagcctggtgacagagaaacgctccatctcaaaaaaaaaaaaaaaaaattgcttaacccaaaatcagaaggtttacaccaatatttcctcttaaggattttgtagttacagctcttaaaaacatttaggtctttaaacattttgagttaattttgtatatagcatgaagtagagggttcaacttcatccttttgtgtgtagataaccagttctccagcaatatttattgaaaacactattctttatcattgtctagatattcttgtctaaaatcacagatgtatgggattatttttaaactttccaatctattccattgatctctatatctgaccttgtgcctgaaccacactgacttaactactattgctttatagttttgaactcaaagtgtgattctccaacttgacttcaagatagattggctattctgggtctgttgaatttccatgtgacttttagtatcaatcagctttacaatttctgcaagcaaaaaaaggtagctgggattttgatgagattgcattatgtcatgtagattaatgttgggtatatgacacagtaacaacattaagtcttcaacccatggacacaaggtggtctttccattaatttagggttttcttaattttttttggttacgtttgtggctttcaggatacaagtctctcatttcatttgttaaatttgtcctgaaatattttgttctatgccattataagtggagtgtttgttttgttttcgttttgttttgtttgtttgtttgtttttgacagagtttcactcttgttgcccaggctggagtggtgtgatgtcggctcactgaaacctctgcctcctgggttcaggcaattctcctgcctcagccttccagtagatgggattacaggcacacgccaccatgcctggctaattttttgaatttttagtagagacggggtttcaccatgttggccaggctggtcttaaacccctgacctcaaaagattcgcctgcctcggcctcccaaagtgctggtattagaggagtgagccactgtgcctggcattgttcattttattttgtttactgccagtgtatagaaatacttttgattttgaatcgtcggatcttgaatctagtacttatgttactggcgcacactgccctggcgctgagccagtggttctgtgctctaaactggtcagaaaattaactatggcatgactaagtttatctggggtgtccaacatctctgatttgaataatatacacagtatgtttgtgtttattcttctcccttctcttttgcaggaatttcacaagctgtgcaacaagatagtgccacagctgcagagacaaaagaacaaggtgaatgaaatagatctattcatttgttgccctcctggaagaaagttgggtgagagaagttcatgtagttcaaaggacggggaaatccactttccctttcttcatcctcatttgtctctggtgtgtgagtccctcttccctaagagatcttgggatcagcaccatggacagaaccttgcacgttcactacgattattttcactacagttttttatttttaactgaaaaataagaattgtatatacttatggggcgtgaggtttcaatacacgcatatattgtagaatgatcaaatcagggtaactagtgtatccatcacctcaaatattctttgtgctgagaacattttatttttacttatttatttattttgagatggagttcttttcttgtggcccaggctggagtgcagtggtgtgatctcagctcactgccagctccgcctcccgggttcaagcgattattctgcctcagcctctcaagtagctggggctacaggcatgcaccaccacgcccagctaattttgtatttttagtagagacagggtttctgcatgttggtcaggctggtctggaactcccgacctcaggtgatccacccacctcagcctcccaaagtgctgggattacaagcttgagccaccacacccagctgtgctgagaacatttaaaatcctcttttagctattttgaaatagactttgttattaaccagtcaccacgttgtgcaatagaataccagaacttactcctcttgtctagctgtaagtttgtacctgttgactaatgttttccaactttcccggtccactctctgccccaccagcctctggtaaccactgttctaccctccaattctgagttcgacatttttagattccacgtgtcagatcctctggtatttctctgtgcctggcttacttcacttaacataatgtcctctaggttcctcaatgttgtagcaaatgacagaatttcctgtatgttttagagctgaataacccattgtgtatatacaccacatttttttaagggagtcttgctctgttgcccaggctggggtgcagtggcgcgatctcagctcactgcaagctccgcctcctgggttcaagtgattctcctgcctcagcctcccaagtagctgggattacaggcatgcgccaccatgcccagctaatttttgtatttttagtgcagatggg[134 bp omitted]tagttgtgaccctctttcattcccgactccagtaattttagctgtctctttttttccttggtcagtctggctaaaggtctgtcaattttgttcttttcaaagaacaaactggtaggtttgttttctctatggtatttccatcttgtattttgtttatttctttattccctttctctgcctgttttggggtgagtttgctactcactaaccccaaaagggggttctttcctactttaaggtgggaagttatattatatttcagatctttcttaggcatttatggctataaattttcctttatgcacggctctacctacacgctgtaaatattgctgtgttttgtttccactcatttcaaagtatttaattcccttttgtttcccctttgacctgttgaggatcgtgtggcttcacttccatatatttggaaattttcaaattttctgactgatttctaatcttatttcattgtgttaagagagcatactttgtataatttcaaggaacataaacttgaagcatgttttatgcctgatgtatctatcttgaagaaggtctgtttgcagttgagaagggcatgttttctgctgttgggtggagcgttggtttgatatctgccttcactgttttccatatcggtaaatagcgtcactatgtgcctggtcgtttacaccaaaagcttagtcgttttttgctcgtttgtttgtctcactctgtctcccaggatggagtgcggtcgcgcaatcttggctcactgcaacctccacgtcccaggtttaagcagttcttgtgccttgacttccttagtagctgtattttttaatatttattttctccaccatatatctagcaaatcagaagatcatatggtctctacccgtaatatatgacccatttttacacagttcttcccatcttctgtatttctgtggtgtatatacacaatgggttattgaaggcatttcatttgcgtcccaaacgcaatccacttttacatacaatcaatttttcatacaataaccaaggcgatctaaaaatttacgcctgtaacttgattcccatgcttaaaaatccttaagtggtttttattctgtttgtgattttaaaaaatctataatttttctctaattgacaagacaaagaccaccctaatgattgttctttaaaatggcaaatctattctcatatatcctaagacgaatttgtatttagcctcacatggtaactatttcctgataaatatatatagtggttattctcagtcagtggtagctactatatgccagaggctgtgttattactctaccaaatcatctccacagcaactcgacaacataagaacaatttctttgcttttctagatgagcatacagaaacatttaacttcagtaacttgatgaagatcttacaaatagtttatgacaactcacatttgaatcctgtgtctaattcaaatccaattctttttttaagagagagagttttgctgtattgctgagactacaatgcagtggctatccacaagcatgaccgtagctcactacagcctcaaactgctggactcaagtgattctcctgcctcagcctcccaagtagctgggactacaggcatgtaccacaaaatctggctctaagatcctaagatccttaattcttaactgtaggttttgcccctcatttaatttttgtattcttattattatttttggagtgcagtggcatgatctcagcttactgcaacctctgcctccaaagttcaagttactctcctgcttcagcctcctgagtagctgggattacaggcacgtgccaccatccctggctaactttttgtattttttagtagagatggggt[135 bp omitted]ctcttcaaggagaaatgagcctgggaccctcaccctcaagctttgaattagtgctcattgtaccagtgcactctgtcttctagctgagacagtggttgccatgttttcaactggccagaaaataaatatggcatgactaagcttatcttgggggtgtctgacatctctgactcaaataataaacacaagtatgttggaattcattcttcttttgcagaaatttcacaagctatggaacaagaaggtgccacagcagcagagacagaagaacaaggtgaggaaaatagatgtattccttggttgccctcctggaagaaagttgggtgaaagaagtgtaagtagtttagatttcaagggtatgtagtttagattgcctttcttcattctcatttgtctctggtgtcaaccccttcccttcaagctcttgatcagtaccatggatagagctacgcaagttcactgtgattatctacagtcagatactatgaagacaaaattctaaagaacccataattctaggggactcgaatcaatcacaactttgtttgatggatgttaaacatatggccaagagtagtcaaatgctgtcttcaaacttaagtggcagtaattatttttgtaattccttctatcaactaatatgtacatgaatacctgccattgaagaattgtgctggaattacagtggtaagaaaaacatgtcttgccttcatggcatttttttttttttgagaaggagtctcgctgtgtcgcccaagctgtagtgcagtggcgggatctcagctcagtgcaacctctgcctcccaggttcaagcgattcttctgtctcagcctcccgagtagctgggattacaggcacctgccactgtgcccgactaatttttgtatttttagtagagatgggg[132 bp omitted]tcttcaaggagaaatgagcctaggaccctcaccctcaagctttgaattagtgctcattgtaccagtgcactctgtcttctagttgagccggtggttgtcatgttttcaactggccagaaaataaatatggcatgactaagcttatcttgggggtgtctgacatctctgactcgaataataaacacaagtatgttggaattcattcttttgcagaaatttcacaagctatggaacaagaaggtgccacagcagcagagacagaagaacaaggtgaggaaaatagatgtattccttggttgccctcctggaagaaagttgggtgaaagaagtgtaagtagtttagatttcaagggtatgtagtttagattgcctttcttcaatctcatttgtctctggtgtcaaccccttcccttcaagctcttgatcagtaccatggatagagctacgcaagttcactgtgattatctacagtcagatactatgaagacaaaattctaaagaacccataattctaggggactcgaatcaatcacaactttgtttgatggatgttaaacatatggccaagagtagtcaaatgctgtcttcaaacttaagtggtagtaattatttttgtaattccttctatcaactaatatgtacatgaatacctgccattgaagaattgtgctggaattacagtggtaagaaaaacatgtcttgccttcgtggcatttttttttttttttttgagaaggagtctcgctgtgtcgcccaagctgtagtgcagtggcggtatctcggctcagtgcaacctctgcctcccaggttcaagcgattcttctgtctcagcctcccgagtagctgggattacaggcctgccaccatgcccgactaatttttgtatttttagtagagatggggtttcaccatattggccaggtcggtctcgcactcctgatctcgtgatctgcccaccttagcctcccaaagtgctgggattacaggcatttgccgctgtgcccagctgccttcatggcatttatcatccagacttacacattagctaaaccttatggaatgaagatgagtctaaagtgctataactttgcaggatgatgattaaacagccaaagatgtaagagcaggcttccctgagaaactgttgattgaggcttttttgttgagatataattaggattttatataccataaagttgaccctcctgaagtatatgattcaattatttttagtctattcagttatccaactgtcatcactaattccaagacattttttttctcccaaaaagaaaccccatacccctttgcagtcaccagtttcctctccctcaaaactctggacaaccactaatctactttgtatctctaaactctccgattccagatcggtcatgtagatggaatcatatgatatgtagttttctgtgactggccatgtttcacttggcataaagttccaaagcccgtgttccagtgtctatcagcacttcgtttttgttgctgaataatattccattgtatggaaagaccccattttcttcatctgttgttcagttcatgggaatttggcttttttctcactttggggctgttaacagtgttccctgaacactcatgtcctaggaggcagtgatggaaagaagtgacttgactagcatgagatattgaagatataaagctaactggaattggtgattggcagagttctgaaaaaaggggctctgggaattgctctcacctttcttctggaacgatctggtgggtggtgatgccaggagtcagtgactaacattttgagctctgagacagcttcaagctgggctattatcccacctgtgcaatgtaatgttgatcctgtgtgagctacataatcattcactcaaccaatatttgaaaaactaatggttgccagtgttgtcaactttaaattgggacgaataatatacacaaatatcggtgacatttttagaataattactctggtctaggcactgttctccacattttgattgtcaagacaccttcacgctaacctagtaaggggagatacactctccactccaccccttttttgaaacagggtcttgctgtgtcgcccaggctgaagtacagtggcacaatcacagctcactgcagcccctaactcctgggctgaagcaatcctcctgcctcagcctcctaagtagctggaaattaggcatatgctacaacatctggctaattttcatatttgttatagaaaggagggggcagggggtctcgctatgttgctcagtctggtcttgaactcctggcctcaagtgatctgcccatctcagcatcccaatgcactaggattacagggatgagccactacgcccagccaatccctactatataaatgaacaaattaccatataccggattgatgggaagccacaattaaatttatgtaaaacaaggaaaacaatgagctcatcatctgctccaaagtaggatcacaaacacaacctttttttcttgttatcacttagaaaaaacctatgagagaatattttttgttagaagtaaaagatgaggttttttgttttttgttttgagactgagtttagctcttgttgtccaggctggagtgcaatggcgcgatctcagctcactgcaacctccgcctcccaggttcaagcgatgctcctgcctcagcctcccgagtagctgggattacaggcatgtgccaccacacccggctaattttgtatttttagtagagagatggggtttg[142 bp omitted]ctgtgaccccttaaaggggcgagttagacacacaagtctggaattttaggaaagaagccctcacgaaggagaggatgggaaccctgaagtatagacgtgataattaaatccatagaaaaagaggtgtttgaggaagaactgagggaggcctgagtttgaatgcagactggcttcctggggtttccctccctctgtaaaaacctacattccagtggcactgccagtcctctgaggacaacaggtcggtctgagctcagcaaatagaggttctagtcttaaggtgtgcttcccgtggtttcaacacggctctgttaacacgtcccctgatgtggacgacagacggccctccgtttcccatgggttctgtgtccatggattcaactaaccatcgatcaaaaatattcaggaaaactccacaaagttccaaaaagcgaaatccgaatttgctacatgctgagcggtgcgttgagtccacacaaattgaagcgatgtgtagacatcgtgttagatattataagtagcctagagatgacttaacctacgtgggaagaatccacacaaatgaagcaatgtgtagacatcgtgttagatattataagcagcctagagatgacttaaactacatgggaggatgtgcgtaggttatatgcagttataccattttatatcagggacttgagtatctggagattttgatgtcatttggggatgtcctggaacccatcttggactgattcagaggatacaactacaatgaagtgtaagttctagaatttttatgtggagactttgcatacagttagtaattgtattacacatttgtgcagagagactcttgctgcctttttaaggtaaatagtagtaccagtaaacttaaggtcccaggatatgaatctttttcacgttcattgagtacctatcagatatcagaggctgaagaggctggaactattgaggcaaaaagacaaggtatttttctcatggagcttacattataagctagggggctgacaaaaactaaatgcataaaagagttgaagtttgtgataaatgtcaggtggtataaaataattatagtttgtgataagtttcattttttcacattttcaggccctgtgctaatgttgaatgcatattcttaaatctttatcaggtgggccgggcacagtggctcatgcctataacccgagcacttgggaggctgaagtgggcggatcacttgaggtcaggagttcaacaccagcctggccaacatggtgaaacctcatctctgcttaaaaaaaaaaaaaaaagaacaaatatatatatatgtgtatatataacatatatacatatatgtacatatatgtatatatgttatatatacacatatacatatatttatatatacgtacatacatatatacgtgtgtatacgtacatgcgtatatacatatgtatatgtatatgtgtatgtatatgtatacatatgtatatgtatgtatatgtgtatatatgtatatatacacatatatatacatacacacacacacacacacatgaaattagctgagcatggtggcaggcacctgtaatcccagctacttgagaggctgaggcaggagcattgcttgaacctgggagatggaggctgcagtgagccaagatcacgctgctgcactccagcctgggcaacagactgcaactgtgtctcaaaaaaaaaaaatcttcatcaggtggggaaactgaacagcagcttgtatcaaatcatacagatgctctacagcaggggtccccaacccccaggccatggacttgtagggtggcctcttaggaaccaggcagtatagcaggagggagcaaagcttcatctgtatttacagctgctccccatgactcatgttaccacctgagctctgcctcctgtcagatcggatgtggcatttggttcttccaggagcatgagccctattgtgaactgcacatgtgagggatctgggttgcgtgcttatgagaatctaatgcctgatgatctgtcagtgtctccatcacccccagatgggaccatctagttgtaggaaaacaagctcaggctcccactgatcctacattatggtgagttgtatgattatttcattatatattacaatgtaatcataataaagtgcacaataaacataatgtgcttgagtcatctcaaaaccacccccttccaccccggtgtgtggaaaaattgtcttccacaaaaccggtccctggtgccaaaaaggttggggatcactgctctaccgtagagcttgggttccaggcgggatctgtttgacctcaaggaacgtgctccgttctctctctctctctctctgtctctctgtttttttttgagatggagtctcgctctgtcgcccagtctggagtgcagtggcacaatcttggctcgctgcaagctccaccttctgcgttcatgactttctcctgcctcagcctcccgagtagctggcattacaggcgcccgccaacatgtctggctaactttttttttcgtatttttagtagagacggggtttcactgtgttagccaggatggtctcaatctcctgaccttgtgatccacatgcctcagcctcccaaagtgctgggattacaggggtgagccagcacatccggccattcccctctttatgtacagcaggattcccccattgcgtgggggaaaccaagggatggaacaggaggggcacacctgtcctacaggtgtagaacttggggccatggtacatgcatccgtggctccctcaagttcccctccccctccccaaggccacttatgttggcatacatcattcatttaacaaatacttgatttcccacagagtgccaggcactgtcataaatactgaaggtccaagagtgagtaagaaagtccatgtttagattctacggggggagaccatcagcaaatacagcgtaacccatcaggtccccagtgcaaaaagggacatcgggttgaacaagggaagcagagctattttgtagattgttaagaagcttttgaggcctttaaagtagggaacgaagagtgagcatgttctcagcacctggctaggaagaaacaagacccatgtctggaggctgactcaggccccactgatgctcggtccagggtttctgtgagg[132 bp omitted]aaaccccgtctctactaaaaatacagaaaattagctgggcgtggtggcaggcacctgtagtcccagctactcaggaggttgaggcaggagaatggggtgaacccaggaagcggacgttgcagtgagctgagattgcgccactgcactccagcctgggtgacagagcaagactccatctcaaaaaaaaaaaaaaaaaaaaaatagactggcttcaaattttgtttcccgatttatttttatttttattttgagatagagtctcgctctgtgaccaggctggagtgcagtggtgtaatctcagctcactgcaacttccatctcccgggttcaagcaattctcctgcctcagcctcctgagtagctggggactacaggtgccaactaccatgactagctaatttttgtatttattagagacggggctttgccattgaccaggctggtctcaaactcctgacctcaggtgatatgcccatcttgacctcccacagtgctgggatgacaggtgcgagccactgtgcctggtctgtttcctgattttcattctaccctctctgactccaggacatggaggtgacacatgggactacaagagtcacgtgatgaccaaattcgctgaggaggaggatgtacgtcgtagttttgaaaacactgctgctgactggccggaaatgcaaacgttggctggtgcttttgattcagaccggtggggcttccggcctcgcacggtggttctgcacggaaagtcaggaattgggaaatcggctctagccagaaggatcgtgctgtgctgggcgcaaggtggactctaccagggaatgttctcctacgtcttcttcctccccgttagagagatgcagcggaagaaggagagcagtgtcacagagttcatctccagggagtggccagactcccaggctccggtgacggagatcatgtcccgaccagaaaggctgttgttcatcattgacggtttcgatgacctgggctctgtcctcaacaatgacacaaagctctgcaaagactgggctgagaagcagcctccgttcaccctcatacgcagtctgctgaggaaggtcctgctccctgagtccttcctgatcgtcaccgtcagagacgtgggcacagagaagctcaagtcagaggtcgtgtctccccgttacctgttagttagaggaatctccggggaacaaagaatccacttgctccttgagcgcgggattggtgagcatcagaagacacaagggttgcgtgcgatcatgaacaaccgtgagctgctcgaccagtgccaggtgcccgccgtgggctctctcatctgcgtggccctgcagctgcaggacgtggtgggggagagcgtcgcccccttcaaccaaacgctcacaggcctgcacgccgcttttgtgtttcatcagctcacccctcgaggcgtggtccggcgctgtctcaatctggaggaaagagttgtcctgaagcgcttctgccgtatggctgtggagggagtgtggaataggaagtcagtgtttgacggtgacgacctcatggttcaaggactcggggagtctgagctccgtgctctgtttcacatgaacatccttctcccagacagccactgtgaggagtactacaccttcttccacctcagtctccaggacttctgtgccgccttgtactacgtgttagagggcctggaaatcgagccagctctctgccctctgtacgttgagaagacaaagaggtccatggagcttaaacaggcaggcttccatatccactcgctttggatgaagcgtttcttgtttggcctcgtgagcgaagacgtaaggaggccactggaggtcctgctgggctgtcccgttcccctgggggtgaagcagaagcttctgcactgggtctctctgttgggtcagcagcctaatgccaccaccccaggagacaccctggacgccttccactgtcttttcgagactcaagacaaagagtttgttcgcttggcattaaacagcttccaagaagtgtggcttccgattaaccagaacctggacttgatagcatcttccttctgcctccagcactgtccgtatttgcggaaaattcgggtggatgtcaaagggatcttcccaagagatgagtccgctgaggcatgtcctgtggtccctctatggtgagtaccccaggcagttttatcctatgccgtgtgctgagctctgtgtctctactgctgggacttgacatgacttccaggaacttcaaggtcccagagaattctttcaggatgaatggcccagatgacgtccagctggctaaaatgccaggaccggaatctggctcattgtccacacctgggaaaggtctttcacaatacagggccccgcctaagactaaaggaaaggctctggggttgaaacccaggaatatgtggtttattttattattttaagtcagagtctcactctgttgccaggctggagtgtagtggcacgatctcggctcactgcaaactccacctcccaggctcaagagattctcctgcctcaggctgccgaggagctgggactacaggcatgcaccaccatgcccagctagtttttgtaattttagtagagatgggatttcgccacgttggccaggctggtctcgaactcctgacctcaggtgatccacccgcctcagcctcccaaagtgctgggattacaggcatcagcaagcccctcccatgaatgtgaccgctcaggtttgtggactgcttatttggtatggtgtccagggccgtgctgtccagtagagggttctgtgatggaaatattccatgtgccttgtccagtaggacagccaccagcctcataagcctgttgagcatctgaaacatggtgagtgagactgtggaggtgaaactcatctcactccatttcaactcatttgtatttttttctttttttgagacagagtctcactgtgtcaccaaggctggagtacagcagcatgatctttgctcactgcaatctctgcctcccgggttcaagcgattctcctgactcagcctctcaagtagctgggattataggcagtgccaccatacctggctaatttttgtatttttagtagagacagggtttcaccatgttggccaggctgatctcgaactcctgacctcaggtgagccacctgccttggcctcccaaagtgctgggattataggcataagctgctgtgcccggcctcatttgtatttaaatagtcacacatagctgatgcttgctgaatagtgcaggtctagaaaacacactttgctggactgtctcagtgtcatcctcctatgacccagaacacagcagtgacgaatgtggacaggctgggtggacgaggattacttgaggccaggtttttgagaccagcctgggcaacaaagtaagaccctgtctgtggacaggctgggtgcagtggatcatgcttgtaatcccagcactttgggaggctgaggtgggtggatcacgaggtcaggagttcgagaccagcctggccaacatagtgaaaccccatctctactaaaaatacaaaaattagccaggcatggtggcgcacacctgtaatcccagctactcaggacgttgaggcaggagaattgcctgaacccaggaggcagaggttgcagtgagccgagatcacgccactgcactccagcctgggcaacagagtgagactccatctcaaaaaataaaaaaagcctcaaattatcacatggggctgggcgcggtggctcatgcctgtaatcctagcactttgggaggctgaggcaggtggatcacactaggtcaggagttcgagaccagcctggccaacatagtgaaaccccatctctgctaaaaatacaaaaattagtggggcgtggtggtgggtgcctttaatcccagctactcaggaggctgaggcaggagaattgctggaaccccgcgggcggaggttgcagtgagccaagatggcaccactgtgctccaacctgggtgacagagtgagactctatctcaaaaaaaaaaaattctcacatggaagaggtctggcacagcacctgctgtgtgctaaggccttgataacagggcagctacctttggttggaaaacaagtacaaatgcttgctttttaggaggtgagctcatgtcagtgcagaaagaaagaacagcttgcccgttactttgttctttccacagccaagaggagtcacagcctgggcaattttcctgtagattggctgaaaacgtgcgcagccacaggctaagcactgagatgggaaatttacatatcataaaaagtcaaagctacttgtgttcacagctaccctgtgctatacttacattcattcgctttcttcttcttttttttttttttttttgagacggagtcttgctcggtcacccaggctggagtgcagtggtgcgatctcagctcactgcaacctccacctcctgggttcaagcgattctcctgcttcggcctccctagtagctggactacagttgcccaccaccacacccggctaacttttgtatttttagtagagatggggtttcaccatattggccaggctggtcttgaactcctgaccttgtgatcctcccatcttggcctcccaaagtgccgggatgacaggcgtgagcgactgcgcccggcctctatttttcttttattcttgagggcaaacccatgaggttagctccctgttcacaaacgtgggaaggtatacactcagacacgtgggaaggtataaactcagacaggagatgattgccagtggacgggagactaattgctccaatttttaggtgtacgatacaatattaactacaggcacgacattgaacaatggatctctagaactttttcatctcacatcactgacccttcatgcccatgaaacgataactccatctcccctgctccccaggcccccggcagcctccactctactttctgctattttagacatttcaaagtagaatcatgagcccagtgtattggtggctcacgcctgtcatcccagcactttgggaggccaaggtgggtggatcacttgaggtcaggagtttgagaccagcctggccaacatggtgaaaccccatctctactaaaaaaatacaaaaattagccaggcatggtggtgggcacctgtaatctcagctacttgggaggctgaggcaggaaaatcactcgaatttgggaggcagaggttgcagtgagccaagatcatgccactgcactccagcctgggagatagagactccgtctccaaaaaaaaaaaaaaaaaaatgtagactcatgcagcattttgcagtatttgtccttttgtgactggtatagctcacctaacataatatcctccaggttcatccacactgtcaaaaacggtagaatgtcctcctctaaggacgagtaatattccattaacatatgtatcacatgttctttgttcatccatggatggacatgtaagttttccagatctgagctattatgaaaatgccacagtgagcgtgggagaccaaacacctcttccacatcctgatctcagttcttccgggtatacacccagaggtaggattgttaggtcctatggtagctctattttaatatttttttaggaacctctgtactgttttccacagctgttgcacagttttacgttcaagtggggctggaattgaagcaaagatctgatgcagggctgggcacggtggtggctcacacctgtaatcccagcaccttaggaggccaaggcgggggcagatcatgagatcaggagttcgagaccatcctggccaacatggtgaaaccccatctctattaaaaatgcaaaaattagctgtgcatgatggcatgcgcctgtagtcccagctactcgggaggctgaggcaggagaatcgctcgaacccaggaggcagaagttgcagtgagccgagattgcgccactgcgctccagcctgggcaacggagcgagactccatctcaaaaaaaaaaaaaaaagatctgattcaggagctggcggttcccagtcatgcctgcataccccctcgggtatcggtatatccgggaggcagggtggacaccgggctagtcatgcaaagtgtgatggcagccgctaagttgcctcagggcctctaaagccaccgtggtctcacctcgagagctcggtccctctcctccgacgtgttgccacgactgctcatgttaaactccatcccatgagcccatgtttctatcccccctgacataggatgcgggataagaccctcattgaggagcagtgggaagatttctgctccatgcttggcacccacccacacctgcggcagctggacctgggcagcagcatcctgacagagcgggccatgaagaccctgtgtgccaagctgaggcatcccacctgcaagatacagaccctgatgtaaggctgcccgccccctacgagagaatcccttcccatgacgctatcccagctctcccctacctcctgagagacccatctgaagcctttcaagtgcagcctgagggcataagtgccaccaaaggtgtaggaaccaagttcccaaaagcaca[132 bp omitted]tgaaaccccatctctactaaaaatacaaaaaaaaaattagcagggcatggtggtacgtgcctgtaatcccagctacttgggaggctgaggcaggggaattgcctgaaccagggaggtggaggttgcagtgagccaagatcgcaccacggcattccagcctgggtgacagagtgagactccatcttaaacaaaaaacaaaaaaaaaccttgtgctgatgttactgaagcaggctccttgacaccaggtttggacgggtttggatggattaagctccccaaggcagggattgttaatactctttcatacaccattcccagtagctggcccatcacaggcactcaggtattcgttgttttaaaaggaaatacaattaattagaaatttgcaagttagaatgggagaaggatgggaaggaaaaatgaggatacaactaaacatcaccagtgtcgaatgtgtctccccttccccattgcaggtttagaaatgcacagattacccctggtgtgcagcacctctggagaatcgtcatggccaaccgtaacctaagatccctcaacttgggaggcacccacctgaaggaagaggatgtaaggatggcgtgtgaagccttaaaacacccaaaatgtttgttggagtctttgaggtacgtctctggtagagcttttgccttgtttttcttcgtttttacttgtgtttgaaatgattacataaagtggcaaaaattaaagagctgcaaagatggaaaagttttggtgatggatggtggtgacgattgcaggagttgagtgccactgaattgcacacctaaatagttaaaatagtgcattcggttataaatactttatcacaattaaaaaaactcagtttcattaaaaattgttcatgcagaggcaaggtctcgtttggttgctcagtctgatcttgaactcctgggctcaggtggtcctccccgcttggcctcccagagcactgggattataggcttgagccaccatacc[145 bp omitted]gaaactccatctctaccaaaaatacaaaaattagccaggcgtggcagccacctgtaatcccagctactcgggaggctgagtcaggagaatctcttgaacccggcaggcggaggttgcagtgagctgagaccgtgccactgcactccagcctgggcaacaagagcaaaactctgtctcaaaggaaaaaaagtgcccttctggcagtttctcccagtggttaatcttacatactatcgcataatatcaaaactgggaaacagatcctggtatggtgtgtgtacattattctatagcagtttattacatctagatttgtgtaacagtcacagtaaccaagatgctctggggtcacacacccctccctaaccgcaccattcctaatcctcaggagccacgtgtgtcttccatctctgtataaccttgtcattttgacaatgctcttaaagtgaaatcggtgtggtacatcgtcgcctgaaactggctttgctccatcagcgcttgagatccacccaagcagtcaagtgttacacactttcttcctttctgttgatgatggccattcaatgctatggagtaccacagtttaaccattcaccatccagggacacgttggttggttggttggttggtcggtcccagtttgtggctcttactgtggtttgtaagtcctgggaaggtggttttttcattagattagcttggtttagagatacaactatttaatgtttatatagttttcttttctttttgactgagtctagctcagttgctcaggttggagtgcagtggcatgatctcagctcactgcaacgtccacctccctggttcaggcaattctcctgcctcagcctcccaagtagctgggattacaggcacccgccaccatgcctggctaattcttgtatttttagtagagatgggggtttcaccatgttggccaggctgtcctcgaactcctgacctcaagtgatccactggctgtgccctcccaaataaagtattctgagacagacaagtacaagccctgctttgagctttgttagctggcacatcaactaacatcgaagaatagtaagaaagaagaagaatttgctttgtaccatgtggtgtttgcctggcagccagggaactgcactttaagaagatgtaacccagggaaattagccaaagcataaatgttgtctcaggacggaaatgctgtgcctgacatcgtgtggggtttatctgggaacagatggaggaagctgcatgctcactcttttgctcactgtctgcaccacaagtgcagagagctggagcttagattcaaagaataaataagatagacattgtcggaaaagatggatggaggctatttggggccaaggaaggaaaaagcatgaagtcacttaggtccagtttcctggaagtctaacgaatttaccttctcataactcaactaatgaatttaccttctcataactcacaggggcaggagtattgctctcttctcttcactcctgtattcccggaacctagaactgctcttttcctgacacctggcccgtattccccaaagtacttattggatagagggatgggatgatcagctaagtctctaaatgggagactttgacattggaagatggattgggccacatcgtgaagggtttccattcactatcacattgaggagttggaacttcctttattcaataacgacagatgcttgattctgcgtatagtacatgttccagggatgtgctgatgaatgaaacgagattctttgattcaataacgacagatgcttgattttgcatgtagtactacgacatgttcctgggacatgctgatgaatgaattgagattcttttttttttttttttttttttggagacagagtcttgctctgttgcccaggctggagtgcagtggtgcaatctcggctcattgcaagccccacctcctgggttcacgccattctcctgcctcagcctcctaagtagctaggactacaggcgcccgccaccacg[175 bp omitted]ttgattctgtgtgtagtagtatgacatgttcctgggacatgctgataaatgaaacgagattgttttattcaataacgacagacgcttgattctgcgtgtagtactacgacatgttccagagatgtgctgatgaacaaaacgagattcctgctctcatggtgctcacaggccagcacagggagagcagaacaagacaaaaagaatgatgtgtgcacacacacggcaggagcatgtataggcttggagagctctaaaagttctgtctaaaattcaacacagaccaggcacagtggctcatgcctgtcatcccagaactctgggaggctgaggcaggtggctcacctgaggtcaggagatcaagaccagcctggccaacatggtgaaaccccgtctctactataaatacaaaaattagtcgggcatgatggcatgcacctgtaatcccagctacttgggagactgaggcaggagcatcacttgaacccaggaggcagaggttacagtgagccgagattgcgccactgcactctagcctgggtgacagagtgagactgtctcaaaaaataataataataaaataaacctgcttccttcatctctgccctagccaggtactggcctaagtgtttcgtggctattctaatattctaatcctcacaaccatcgctgaggttggtagtgctgttgtcctcatttccagggcataaactgagttgcagagatgctaagctattcggttaacagggaattaagtgatgtgttagatttgggggtggatgtgctggctcgtggggtagctgtgtacgttcctctttcgtaaatactgccggtcatcccggaagctcgtgcccttcagcaaatgctcgagtgccctttgtgtaccaggcaccgtcgcagctgccgaggggaccatagagaacaaagcaaccaggcctccaccttcatggagatgacattctaggaaggaagacaggcaggaaacaagcactaacataagtatgtggaacgttgggtggaggccgggcacagtggctcatgcctgtaatccagtgctttgggaggccaaggcgggtggagcacaaggtcaggagtttgagaccagcctggccaacatgatgaaaccccgtgtgtactaaaaatacaaaaattagccaggtatggtggtgggcacctgtaatcccagctactcaggaggctgaggcaggagactcgcttcaatccgggagatggagattgcagtgagccaagattgcgccactgcactccagcctgggtgacaagagcaagaccctgtctcaaaaaaaaaaaaaaaaaaaaatgttggctggggtgggttgctatgaatgttgagacaatggagggaagtggggtaggcaccatttaaggtctggcttacccgaaaggcgaccttcaagagacatgaaaggacgtgaaccccatgaaaacctgagggagggaggaggggaggttgcactggaaggaacagcaacttctcaggcccggaggcaggagcagacagagttcgaggaccaggaaaacggccagcgctgctggcgtgtgctgagtagaggggaaatgggctgctttggacaagagctgggattgcttcatgctgcctgtctctgcaggctggattgctgtggattgacccatgcctgttacctgaagatctcccaaatccttacgacctcccccagcctgaaatctctgagcctggcaggaaacaaggtgacagaccagggagtaatgcctctcagtgatgccttgagagtctcccagtgcgccctgcagaagctgatgtgagtgccacttcctttccaccaggattatcgtaacttccaccaggattatcgtaacttcgattctccaggtcatggtgggagggaaatgagcagatgtacaaaccaggggtgaggaaggaagttgggacctcccaagacctgcccagtgtggggtgtaagagtgacctgaaaaacatctgttcttgctcccaaactctaaatggagataaaaggtggacgcgggaatcagccaggtggaaattgcataatgaccttccctcctgataaagctctcctgggcgtgaggcttatgtgtgcagcttgcactgtgggttagtgaatgcttggccccaccactggagaggtatacccactcagtcactcaaagaacatgggtggcggtcaggctcccctctgcctggtaaagtccaggccagagctcatgcattctgggcttctgggcacagagaggctcaaaaaggaggagggtcacccaaaatcccaatcccacctccttctatggagacgagggagcccagagcagggatgaacccaggcctgtgttgttgtagcagaagggcctccgagtggaaacgcagggggcagcagttctgcacccctaacacctaaagggatatcacttctttccttttccgtgtcagagttttgttgttgcccaggctgagtgcagtggtaagatcctagctcactacagcctcaactcttgggcccaagtgatcctcccgtcttggcctcctgaagttctgggactacaggtgtgagccaccatgcctggcccacttgcttactgataactgatctagggaggggaggcgaagcagcagcaacagttacagcaaccactattcaatgcttactgagctgtgccaagcacagcgctaaaatccctccaacccttcctcgctgagttctcaaaacaggtctacggagcaggtgctgttgataaccctatcgacagatgagacagcttcagaaaggctgtgtcacttgtccacagttggacggtgctcagatggtgatgccgggagtcaagggtggggctaattcagctgagccacccagcgtggcagccattatccacgtgtggccagccaaatctaaattaaatgggaaagtcagtttcctcatcacactagacccatgtcaagagctcagtagccatgtggggctagcagctcccattctggacagcacagctctaggtgacctttaatcttacctggatggcagtgctggtatcagcagtgagacatccaggctcagagggtgacatctgagctctcgatcacaccctgagctctcgatcttgggtgtcatattctcaaggggaaggggcgttcactccaagttctctttacgggaaaacacctatcactcatgtagcagactgtttctggaatcacttcagtgctacataaaaagctgcttaaatggccaggtgtggtggctcacgcctgtaacccagcactttgggaggccgaggcgggcggatcacctgaggtcggcagttcaagaccagcctggccaacgtggtgaaaccccatctctactaaaaatacaaaaaaattagctgtgcatggtggcaggcgcctgcaatcccagctactcgggaggctgaggcaggagactcacttaaacccgggaggcgtaggttgtggtgagccaaggtcacgccattgcactccagcctgggcaacaagcgcaaaactccatctcaaaagcagacagagtatctagtttatgcctaagggtcatgatgtgttagatgtagttttggggggtggtcttgctcactgttctggagtacagtggcacaatcacagctcactgcagcctctacctcccaggctccagggatcctcctgcctcagcttcccaagtagctgggactacatgcatgtaccaccatgcccggctaattttttctttttagagacagagtcttgctatgttgcccaggctggtctcgaactcctgggctcaaacagtcctcctgcctcagcctctcaaagtgctgggattacaaacacaaaccacggtgcccgccctaagtgtacttttaaattggaaaaattggcccagtacagtggctcacgcctgtaatcccaacactttgggaggctgaggcaggcagatcccctgaggtcaggagttggaggccagcttcgagaccagcctgaccaatatggtgaagccctgtctctaccataaatacaaaaattagtcaaacatggtggtgcatgcctatgatcccagctactcaggaggctgaggccggagaatcatttgaacctgagagcagaggttgcagtgagctgagatcatgccactgcactccagcctgggcaacagagcgagactccatctcaaataaataaaaataaataagaaaataaataaattggaaaaattactcattccggcaaagccttacatcatagccatgtggggactggaaatggctgagcagtgattgttgcccagccattccccattgtgactggcagatctaatcacccacaatacttagagtattcttttggggctgatgcactggagttgagtttgcaagttaaaggcagagaggatgcgacttcaccatatgtctgcaaggacatgccaactatgggggtgatacgtctttcccctccttgtaaaggagggaaagatggaactttaagaaggcatctcatcatgtcctctctggggctctcttcttgcagactggaggactgtggcatcacagccacgggttgccagagtctggcctcagccctcgtcagcaaccggagcttgacacacctgtgcctatccaacaacagcctggggaacgaaggtgtaaatctactgtgtcgatccatgaggcttccccactgtagtctgcagaggctgatgtgagtctggcttgctcccctgcaaggacttcctagctttctaacatagcatggtgtagctctcaaagcagaaggcagtggggagggggtgtggacatcatcacatgaagggacctggtatatgctgaattctgtccatgtctcctaggtttcatcctttcttggaaaattctgtgtctgcctttgtgttatcttacagtgggaagtcatttgttcaaggacagtcagttctcataattggaggtcatcatgttctacaaagtcactcttgagcactgaaccagccagcatggagccattgcccctgggagaggtacagggttagcttcctgtgaacctctagtcacgttttcatcaatcgatgaaaatgtatttcatgtttctgttcaatgacttttacttgatacacatcgttgattcgttaacattgagcacatgaccaacggcaccgtgactcgtgcctgacaaagcctatctgacacaagtgatggacctcacagcctccccacgctccccagcattggagagcactttggcgctatgctaggaggtcattttaaacaacactattgcagcggggcgcggtggctcacacctgtaaccccagcactttgggaggctgaggcaggtggatcatttgagctcaggagttcaagaccagcctggccaacatggtgaaatcccatctctactaaaaatacaaaaaattagccgggtgtggtggcgcatacctgtaatcccagcgactcaggaggctgaggcaggacaaccacttgaacctgcgaggtggaggtggcagtgagctggcatgagctgagattgtgccattgcacgccagcctgggcaacagagtgagactgcatcacaaaacaaacaaaattgcccacaaaaagcacaaaaatccaacaaacacggcactaaataccctcaaaaaggacattgttgacagtggagagctgaaatcagttcagcctccactgggagcaacgtgtgtctggagactcaagttcttctctgctctgcacacatgcatgaccaggaaggactgagcactcccggtattgatttggagaattaccaacacattatagcaagtaggaaaattcacaaatacagaatccataaataatgaggatcaattgtgttgattactactgcatttattagttgctagtgatacagacacaatacagatgcagttctcattatttttccaaaagttattggggtacaggtggttacatgagtaagttcttttcttgttgtgttttgagacagtttggctctgtcacccaggttggagtggcatggcgcaatctcagctcactgcaacctccacctcccctcccaggttcaagcgattctcctgcttcagcctcccaagtagatgagattacagctgtgcaccaccacacctggctactttttgtatttttagtagaggcagggtttcaccatgttgtctaggcttgtcttgaactcctgaccacaggtgatctgcctgcctcccagagtgctgggattacaggcatgagccaccatgcccagccaggttacatgagtaagttctttagtggtgatttgtgatattttggtgcacccatcactcaagcagtgtacactgcaccatgtttgaagtcttttatccctcgcctccctcccattcttcccccaaaatccccaaagtccattgtatcattcttatgcctttgtgtcctcatagcttagctcccacatatcagtgaaaatatacgatgtttggttttccattcctgagttacttcacttagaataatagtctccaactcatccaggtcactgcaaatgctgttaattcattcctttttatggctgcatagtattccatcatatatgtatgtgtgtgtgtgtgtgtttctttatccactcattgattgatgggtatttgggttggttccacgattttgcaattgtcagttgtcctgctataaatatatgggtacaagtatctttttcgaatattgactactttttctctgggtggatgcccagtagtgggattgctgggtcaaatggtagttgtacttttagttctttaaggaatctccacactgctttccatagcggctgtactagtttactttcccaccagcagagtggatgcgttccctgatcaccacatccaccccagcatctactgtttttttatgttttgattatggccattcttgcaagggcgatgtggtatcacattgtggttttgattgcatttccctgattattagtgatgttgagcctttttcatacgtttgttggccatttgtatatcttgagaattgtctattcatgtccttagcccactttttgatgggattgttttttcttggatttgtttgagttcgttgtagactcgactctagattgtgaagattttctcctactctatggattgtctgtttactctgctattctttttttttttttttttttttttttttttttttttttttttgagatggagtctcgctctgtcgcccaggctgcagtgcagtggcgtgatctccggtcactgcaagctctgcctcctgggttcatgccattctcctgcctcagcctctcgagtagctggtagctgggactacaggcgcccaccaccacacccggctaatttttttgtgtgtgtttttagtagagacagggtttcacca[137 bp omitted]caattaggtcccagctatttatctttatttttattgcattcacttttgggttcttggtcatgaaatccttgcctaagccaatgtctcgaagggtttttcccatgttatcttctagaatttttagaatttttatagttttaagtcttaggtctttttttttttttggagacagagtcttgctctgtcacccaggctggagtgcagtggcacgatctgagctcactgcaacctccacctcccaggttcaagtgattctcctgcctc[210 bp omitted]tgttaggtgagagatgaggatccggtttcattctccgacatgtggctagccaattatctcagcaccgtttgtcgaaaagggtgtcctttctccactttaggtttttgtttgctttgttgaagatccgttggctgtaagtatttgggtttatttctgggttctctattctgtttcgttggtctatgtgcctatttttgcacgagtaccacactgttttggtgactatgccttatagtttgaaatcaggtagtgtgatgcctccagatttgttctttttgctgagttttgctttggccatgctggctctttttttggttccatttgaattttagaattgtttaattctgtgaagaatgatggtggtattttgatggggattgcgttgaattttgtagattgctttggcagcatagtcattttcacaatattgattctacccatccatgagcatgggatgtgtgtccatttgttcgtgtcgtctgtgatttctttcagcaatgttttgtagttttccttgtagaggtcttttacctccttggttaggtatattcccaagttgtgttgtgttgtgttgtgttttgcagctgttgtaaaaggggttgagttcttgatttgattctccgcttggttgctgttggtgtatagaactattgatttgtgtacattaatcttgtatctggacacttgaattattttatcagttctaggagctttctggaggagtccttagagctttcaaggtaaacattcatattgtcagcaaacagtgacagtttgactttcctgacttggatgccctttttatctttctctcgtctgattactctggctaggacttccagtactgtgttgaagaggagtagtgagagtgggcatccttgtctttgttatgcatgcatctaagtgaagagacaacctgaacaggctaagtgtgagcaacaaggctgtgtattcacttgggtgtgagcgggctgagtctgaaaagagagtcagcgaagggtgatgggattggagctagtttttttttcttttttttattatactttaagttttagggtacatgtgcacaacatgcaggttagttacatatgtatacatgtggcatgttggtatgcacccattaactcatcatttaacattagatatatctcgtaatgctatccctcctccgaccccacaacaggccccagtgtgtgatgttccccttcctgtgtccatgtgttctcattgttcaattcccacctatgagttgagaacatgtggtgtttggttttttgtccttgggatagtctggagctagttttatcggttagggataagcagtggaaagtaacagtctgggaccgtttattgcgggcaggggaagaatgtcacatggtacactgtcacaaggtgggaggggtcacagggcacaatgccacaaggttgattgatcagttagggtagagcatgttacaatgatagaatgttgcaggttggctaatcagctaagacaggagctagctgtttttcttctgtggttttcctgttatcctagactttctggctccaagaggccttctggatgtgtacatgtgggtcacagaggtcaccatggcttgaccatggtgcatcctgctcagaagacctcagtcttattccagttctcaaagggaatgctttcaacttttccccattcagtattatgttggctgtgggtttgtcatagatagcttttattacatgaaggtatgtcccttgtatgccaactttgctgagagttttaatcataaagcattgctggattttgtcgaatgcttttcctgcatctattgaaatcacgtgatttttatttttaattcagtttatgtggtgtatcacatttattgacttgtacatgttaaaccatccctggtatgaaacccacttgatcatggtggattatctgacatgttgttggatttggttagctagcattttgttaaggattttagcatctatgttcatcaaggatattgctttgtagtttcgtgtgtgtgtgtgtgtgtgtgtgtttctgttacgtccttccctggtgttggtattagggtgatgctggcttcatagaatgaattagggagggttccttctttctctatcttgtggaatagtgt[273 bp omitted]tgctgggatcacaggcgtgagccatcgcgcccagccaccacttcttctttgaacgtctggtagaattctgtgaatccgtctggtcctggacttgttggtaatttttaaattaccatttcaatctcactgcttgttactggtctgttcaggatatctaattcttcctgatttaagctaggagggttggatctttctaggaatttatccatgtcttctaggttttctagtttatgtgcataaaggtgttccttatagccttgaatgatcttttgttttcagtgatgtcagttgtagtatctcctgttccatttctcagtgaggttatttggattttctcttctcttcttggttaatcttgccaatagtctatcaattttatattttcaaagaaccagctttttgtttcatttatcttttgtatttttttgtttcagtttcacttaattctgctctgatcttggttatttcctttcttctgctgggtttggggttggtttgctcttgtttctctacttccttgagggtgtgaccttatagtatcagttgatgctctttcagcctttttgatgtaggcgttgagggctatgaacctgttagcactgcctttgctgtatcccagaggttttgatagattgtgtcattgttgttcagtctgaagaattttttaatttctgtattcatttttgacccagtgctcattcaggagcaggttatttaatttccacgtgtttgcatggttttgaaggttccttttggagttgatttccagttttattccactgtggtctgagagagtgcttgataaaatttcaattttcttaaatttattgaagctcattctatggcctgttatggtctatcttggagaaggttccatgcactgttgattagaatgtgtattctgcagttgttggatgaaatgttctgtatagatctgctatgtccatttgttccaaagtatagtttaaatccattgtttctttgactttctgtcttcatgacctgtccagtgctgttagtggagtattgaagtcccccagtattactgtgttgctatctatctcattttttaggtctattagcaattgttttatgaatttaggacctccagtgttaggcacatgtatgtttagaattttgatattttcctgttggacaaggattatataattatataatgtccctttttgtctccttaactgctgttgctttaacgtttgtttcatctgatctaagaatagttacccctgctcgcttttggtgtccatttgcatgaaatgcctttttgtacccctttactttatgtgagtctttatgtgctaggtgagtctcctgaaggcagcagatggttggttggtgagttttttattctgcattctgtatcttttaagtggagcgtttggaccgtttacattcagtgttaggatggagatgtgaggtaccattgcattcatcgttctctttgttgcctgtgtaccttgggttttgttttttgtttttgctttttaacttatatttttgttttgtaagtcctgtgtgatttatgctttaaagaggttctgttttgatgtgtttccaggatttgtttcaagatttagagctccttttagtggagtcttggtaatggcaaaatttctcagcatttgtctgtctgaaaaagactgtatctttccttcatataaaatgcttagttttgctggatacaaaattcttggctgatacttgttttgttcaaggaacaaacaagggccccaaatcccttctggcttgcagggtttctgttgagaaatctgttaatctgataggttttccttcataggttacctggtgcttctgtctcacagttcttaagattctttccttcatcttaattttagataagctgatgacaatgtgcctaggtgaagatctttttgtgattaatttcctgggtgttctttgtgcttcttgtatttggatgtctagttctctagaaaggccagggaagttttcctcaattatgcacccaaatatgttttccaggcctttagaattcttttttctcaggaataccaattattcttaggtttgcatttaacataatcccagacttctggaggctttgttcaaatattcttttttctgtctttggtgg[132 bp omitted]acctccgcctcctggactcaagcaattctcctgcctcagcctcccaagtagctgggactacaggtgtgtgccgccacacccagctaacttattttttattttttatatttatttatttatttatttatttatttagagacggagttttactcttgttgcccatgctggagtgcaatggtgcaatctcagctcactgcaacctttgcctcctgggttcaagcgattctactgcctcagcctcccgagcagctgggattacaggcatgcaccaccacgcccaactaattttttgtatttttagtagagatggggtttctccatgttggtcaggctggtatcgaacttccaacctcgggtgatccacccacctcagccacccaaagtgctgagattataggcatgagccaccgtgcccagcctgtatttttagtagagataaggtttcaccatgttggccaggatggtctcgaactcttgacctggtgatcctcccgccttggcctcccaaagtgctgctgggattacaggtgtgagccaccgtgcccagcctgaatttctttcttctacttgttcaattctattgctgagactttccagaccatttcacatttctaaaaatgtgtctaaagtttcctgatttttttttattgtttttaagctatttccttgaatatttctccctttgcttgtatcatattttggatttccttgcattgggcttcacatttctctaatccctctctgattagcttaataactaagctcctgtattttttcaggaaattcgaggatgtcttcttggtttgaatccattgctggtgaactagtgtgattttggggggatgttaaagagccttgttttgtcatattaccagagttggttttctgcctccttctcatttgggtaggttctgtcagagggaaggtcttaaacctggccaggtgtggtggctgacacctgtaatcccaacactttgggaggccaaggtgggcagatcacctgaggtcaggagttcgagaccatcctggtcaacatcgtaaaaccccatctctactaaaaatacaaaaattagccaggcgtggtggtgcatgcctgtaatcccagctactcagaaggctgaggcagcagaatctcttgtgtccaggaggcagaggctgcagtgaactgagagcttgccactgcactccagcctgggtgacagagcaagactcctcaaaaaaaaaaaagaaaaaaaaacaaatatgaccccaccctacacagaagcagactgcagctgggaggagagcagcagctcacttgaggccatgctggggaatgagcatcacgatcttctttcccatgtgtgtgccccacaggctgaatcagtgccacctggacacggctggctgtggttttcttgcacttgcgcttatgggtaactcatggctgacgcacctgagccttagcatgaaccctgtggaagacaatggcgtgaagcttctgtgcgaggtcatgagagaaccatcttgtcatctccaggacctggagtgagtttcccatgggcgttgggtcaactctatcatactggggtctggagttcctgaaaggtcaagagataggagcagggagaccggaaccaaaaactgctttcagggtgagctgacactcatttttccaagggcaatctaggtaaactgaggtgttgacaccacggtgagcatgggaagggccgatggagcctcatgggaggaaccatgagttctgagaagcccttgatacctaaacactgtgcattcctcagaggaaggcatcttgccctaagttcatcttcagctatttatctgtatggagaagggagagtgcttgtctcttaatctctttccctctggggctcaaatttcttcaccctttgttgaaatgtttctattgaataggaatatcccattattaaacagactgtagaaaaagtaaaagagctcagtgagcaaaaatcgatcttcagtctcacaaccatgcagtcatccctgttagtggtttggatgtcttctggggttctcttgttctagatgcaagcgtgcatttgatgttttacaaagaaaggatcatagtagtcagcacttaatgcaacttaatgcgttctctttttttctttttgtttgtttgtttatttattttgagtcttgctctgttgcccaggctagagtgcagtggcatgatctctgctcactgcaacctccgcgttccaggtttgagcgatttttctgcctcagcctcctgagtagctgggattacaggcatgtgccaccagtcccggctaatttttgtacttttagtagagacggagtttcaccatgtcggccaggctggtcttgaactcctgacctcaggcaatccacccactttggcctcccaaagtgctgggattacaggtgtgagccactgcaccccgccaagcacttaatgcattcttaacatgtggcaggcagagcactaaatattttctatatctaatctcatgtagtctcaccacccccccatcatatccagtggagaactgaactcccaagaaaccaaaactttggcattggtctcacattgtgtctgaggatatgtctattataataaatgaagtacagtaaggtattccattgaatggtgtaggctttaaaaatctcctaaaatttaaaaatctcctaaagctggacacgtaccttatatctagtgttttcatcatgagcataaatgatttcattccaaacgcttgtatgcttggtagcatttgcttattcattacaaaggcagaattaatggaccacaagtggggtatcattttgagatctctcccttcccaagaataaaataaaggactttggtatggattctagttcacaaacttctgagtgcccccaagtattaattctaccatttgttttaattgtttcaagccctacttctgcatggtgtagaatcttagtcaattagagacatcatttttttgagatggcatttaagtgctgggagattaactggatctctccatcaccatttatccatgctagcgccaatgactaggtcacccctacctggtcttcaagggttggccctcacaactgcatccgttttttcttttgtttgttttttgctttgctttgttttggtttggatttttgtgtgttttgtttggttttggtggggttttgttttgttttgtttttgtttttgtttttgtttctgtttttgttttgagacagaggttctttcttgttgcccaggctggagtgcaatagcgcaatctcagttccctgcaacctccacctcctgggttcaagcaattctcctgcctc[135 bp omitted]tggcctcccaaagtgctgggattagaggcgtgagccactgtacccagcctgcatccctctttattcttcacccgatggctcctgaggatggaccatccccctccccagtgctatcatcctacccttagcctcccaagctgaagacagacttggaggccgtttcagtcatttctcctgcgataaaccattcagatgttatttatggggccacccaccccatcttccccatttttcctaagaatagaagcacaaaacttccccttttggattccagacctatcagcatttcagtaacttctgtccccttttctctccatcttggctctgtcagaatctttccagtttctcctcctcccccgtggagaatcttgacctcatctccaagtggaagcaaactctgctgtgctcatttcttttaaagatacctttagccaggtgtggtggcacatgcctgtaatcccagctactggggaggctgaggcaggagaattgcttgaacccaggaggtggaggttgcagtgagccgatatcgtgccattgcactccagcctgggcaacagagtgagactttgtcttgaaaaaaataaaaaataggctgggcgtagtggctcaagcctgtaatcccagcactttgagaggccgaggcaggcggatcacctgaggtcaggagtttgagaccagccttaccaacatggagaaaccccgtctctactaaaaatacaaaattagctgggcacagtggcacgtgcctgtaatcccagctattcgggaggctgaggaagggagaatagcttgaacctgggaggtggaggttgcagtgagccgagatcacaccattgcactccagcatgggcaacaagagcaaaactccatctcaaaaaaaattaattaaaaaataaagataccttcaatcacaccagacactttccccgcctccgctatcattcctctctcaagccaacagataccacgtggtctaagctgttcacaggagtggacaaaacagtggcccgtcaggaaggaataaaggaaactccagttaatgctgctgaaccttctcccgctgttccactttcctcgagagaggcagactctctctattccccgcctcttgcaggttggtaaagtgtcatctcaccgccgcgtgctgtgagagtctgtcctgtgtgatctcgaggagcagacacctgaagagcctggatctcacggacaatgccctgggtgacggtggggttgctgcgctgtgcgagggactgaagcaaaagaacagtgttctggcgagactcgggtaacttcctggggcgcctctttgcgggccgggctgggaggaggtgggggaccccagcatgaggttgcttgaacagggatgatgatgatctggtttccatgagtccctcaagttagatggagtgcaaccttcgcagcaccacagatctgggtataagttccagctcggctcctatggatgagacggatgaagtggcaaatgcttgggaacaaggtctggaggtagaaaaccctcaactgccgattgaacgacccctgcgtgctagtcctggtgctaaatggcggaagtatggaagtgaaaagacctttgtgttgtagtgtgaacagtctagagacaaagacgggcagaaagcaagtgattacctgagtggtccttaaaacttcagtgagcatcagagccagccaggggcttaagacagagctccaatatagtggactatggttcagccatgaaaagaaaagtgctgaggctgggcacaggggctcacgcctgtaacaccagcactttgggaggccaaggtgggcagatcacttgaggtcaggagttcaagaccagctgggccaacactgggaaaccctgtctctactaaaaatacaaaaattagccaggtgtggtggcgcatgcttgtaatcccagctattcgggaggctgaggcaggagaatcacttgaacccaggaggtggaggttgcagtgagccgagaccacaccactgcactccagcttgggtgacagagtgagactccatctcaaaaaaagtgaaaaaaaaaaaaaaaaacgtgctgatacgttccaccacatggatgagccttgaaaacgtcgtgctgagtgaaagaagccagccacaaaaggtcacctggtgtataattccatttgtataaaatacccaaaacagtcaagttcgtacataaagtagaggggttgtcatggctagagggaatgggaagtagaaggggggcagctgaattggtatggggtttccttttacggtgatggaaatattctggaagctagcagaggtggctgcagcgcactgtgaactactctagaatggaatgtttaccatgtgtgagcactgaccatgcactagtcttgtatgtgtgctgcttataaccctccatggcactaggggaggt[137 bp omitted]atctccgccttccgagttcaagcctcagcctcccgagtagctgggactacaggtgcctgccaccatgcccggctacttttttttgtatgtttagcagagacagggtttcaccgtgttagccaggctgcttttaaacttctgacctcaagtgatccgccggcctcagcctcccaaagtgctgggatgacaggcgtgagccaccgcgcctggccgggacccttttccttcttgaagtcacacattgttcttcaagctcatcacaccttggttctctgtcccctcaacttctttctacgtggtcatgtcccttctttagttcctcttcgatctagctttgtgttttatttttatgattttattaaactttatcttatttcttattaaatcaaggcttacttatcttactataataccatcactcatcttttagctccatgttctatttttctttctctgtcttttttttttttttttttttttttttaagatagagtcttgctctgtcccccaggctggagtgcagtggcgcgatctcagctcactgcaagctccgcctcccaggttcaccccattctcctgcctc[134 bp omitted]ggcctcccaaagtgctgggattacaggcataagccaccgcgcctggcctgtttttctgtcttctaaatgcagtgtctcccttagccttctgttctggggtgtgtccacctacaaacactccaagcttcactgaaccgcactctccaccctctctgctctttggtagctgagaatcacaggatcaaaacaggcaatggcgagttgctgttgtgtgcagtcagggatcatggatgtaaatttgttttcccagcattagttgtctggtccactcgttttccccaccacctgagtcaatttcacaacaattcattccctggagacatgcgcacctaccttgttctactgggtgcttcacaaataactcctaccccttcaaataatataaaatcatttactaggaaagccctaaatcttctatcaagaagccaactatgatctgcaccagtacacacttcctcctgtaacaataaagaaagcatggccgggtgtggtggctcatgactgtcatcccagcactatgggaggctgaggggggtggatcacctgaggtcaagagttcgagaccagtgtgccaacataggaaaaccccatctctactaaaaatataaaagttagccgggcttggtggcgtacgcctgtaatcccagctactcaggaggctgaggcaggagaatcactggaacctgggaggcggaggttgcagtgaaccgagaacgtgccactgcactccagcctgggcaacagagcgagactctatttctaaaaaacaaaagcatccctgcggtagttaatttaacccatgttaatcagaggttagtttcctccacgatgggaatcccacaatcatccgtgtgcagcaccttataccatcactgatttacctctcccttgcctctatcctcagcctccctactggatgttttgtctttataaatgcttagatattattttagaagcaaaatgaaaaataagcattcaatcttatctcaccatctcgccataggtggctaaaacaacttgagctgcatctcattaactttttattctatcataagaattccagccgggtgcggtggtgcacgcctgtaatcccagcactttgggaggctgaggccagtggatcacttgaggtcaggagttcgagaccagactggccaacatgatgaaaccccgtctatactaaaaatacaaaaattaggcatggtggcaggcgcttgtaatcccagctactcaggaggctgagtcaggagaatcacttgaactggggaggtggaggtcgcagtgagtcgagctcgtgccaccacaccccagcctcagcgatagagcaagactcagtctgtgcattttggattttttctttttcaatctagaatgattaggacatgtaaaacctatatacccaccacctaatttaaacaatcattagtattttagtatatctggtgaactatttcagagcagcttacggattttgacatccaccccaaaataaccagcgtgctcccttcaaaatagaacacgcctataaaatgccattattatattcaatgaggtcccttggctttctgttgctcttaagatgaaattctaaacccttagtatgacctaggtgcccagcctccgctctcaccactgtctgggactcttttctagccatctagtcatctttgtttctcaaatgtgtctcctttccgcaagcacagtgtacaggtgatttttttatatcaatgcatatgtcaatatgtccttccgccttctcacctttcttcaggtgcagtgttgctttctctgcaggtctgtgttccttgttatgtttccttgctacaggcactctcagcctttctttcattgttttccacaactataatttgagttacccaccatctctcaaagtgagaaccaagcacagtagcctcacctgggaactcgttagaaatgcaaatatttggccgggtgcagtggctcatgcctgtaattccagcactttgggaggctgaggcaggtggatcatgtgaggtcaggagttcaagaccaacctggccaacatgatgaaactctgtttctactaaaaatacaaaaaattagccaggcatggtggcacgtgcccataatcccagctactccggaggctaaggcaggagtatcgcttgaatcccagaggtagaaggttgcagtgagccaagattgtgctactgcactccagtctgggcaacaagagtgaaatgctatctcaaaaaaaaaaaaaaaaggcgaatatttgggtctttcatcagaacaactaaaccagaaactgggaggcagagcccaccagtttcattttttgtttgtttttgttttgttttgttttcccaaagaaaaagtatcaaggtgaaattcatacgggttgaatgaagggtccatcatcgatctttggggttattttctgggtgtcctgaccctgcaggttgaaggcatgtggactgacttctgattgctgtgaggcactctccttggccctttcctgcaaccggcatctgaccagtctaaacctggtgcagaataacttcagtcccaaaggaatgatgaagctgtgttcggcctttgcctgtcccacgtctaacttacagataattgggtaagtcgccagcaattgtcttctgagatacagacctgcttctgttccaggcttgttagctggtggagaagcagtttatgggaaaagttgacgtcataccttgggagccacattttactccattggtgagtgcccactacgttctgagtaccatgctggatgctggagatacaggaatatgggagatagaggccaggtgcctgatatcatggagttcacttctgggtaggttgggaagggcacagaaagaacgttataaatgtttatgctgaaaaaactagaattgctatatgatccagcaatcttacttctgagtatgttacccaaaagaattaaaaggaagatctcagatttcacacccatgttcatagtggcataatgcacaataatagccaagaggtggaagtaacccaggcgctcgtggatgaaaggataagcagaatgtggtgtataccaacaatggaattgtattcagtctcaaaaagaaaattctgacacatgctacatgatggaatcttgacatgccgagtggaataagccagtcctaaaaagacaaatactgtaggattctacctcgaagaggtacttataagagtgaaattcatagagacagaatggtgatttccaaaggattggggtgaggggttggggagttgtgtaataggtgcagagttttagttttgcaagatgaagaattctggcgatagatggttgtggtgatgcttgcacagccgtgtgaatgtagttaacagcactgaacaattcacctagcaggaagtttcttcagtagctcacacacatcatttcagcttcccctctcattcagtccttgtacaagtctggagggctgagttgatggagttcacagaagttcttcaggaccatctcttaagactagaagtttctttcatgacaaagtggcagttcactgatgtcttcagtgtttagtggtagaaaaagcatttgtcatttaggagctcatatccgtagactaacaggagttcagagacttccctgagcatgaaggaacacagttgtacttgaagggagtaaaatcttgaccagagaaatgtacagctggcagcattgatagcccatttgaggttggttgtggtatatttattttattttaagttttttgagatggagtctcactctgttgcctccaggctggagtgcaggggtgcaatcttagctcactgcaacctccgtctcgcaggttcaagcaattctgctgcctcagcctcctgagtggctgggattataggtacgtgccaccacgcccagctaatttttacatttttagtagagaagagttttcaccaggctggtctcaaattcctgacctcatatgatccaccagcttcagcctcccaaagtgctggatgacaggcatgagccaccacgcccgacttccttgtggtatatttatatcaatagaaaatttctcagttgagtaactgttttctccagtatggtccagctgatggcagttgagtttatccagggttcaagttatggcacatgggtataaccaggaagaagtcaagagtggctgtggtagaccctggaatcataggaggaaggtgaagacaggatgaggaaggtgaattgagaaacatggctcaatgaatctgggagtcttggtttggtcaggactgttacagtgacaaaatgagctgaaaaggtggagtgctgttgaaagaatgtgtttatatccttgatttatgaggcactatagccattgacaagatcagtggtgactatgggacttagtagttgaagtaggatagaagtcagacctggatttactgattgacctattatgggtctatttccccatctgtgaaatgggggcggtgctatgtatctatttaaatatgtttatttctcctctagtagactataagcttggtaagggtgggaaatttgccttgtccatccctatatgagaagtcctcatttaatgtcattgatacattcttagaaactgtgactttaagcaaaacgacatataatgaaaccaatgttttctcgttgttatagcaatgactctgaagaaaatgacgttcttcgagaatctgctctagtagttttgcttaaagtcactgtttccaagaacctatcaatgacattaagggagaacttactgtacctccccaaaccctataacacgacccggcacagagactctgaggaaggaattcatggatggactgaaaggtcatgcctgcatcttaggactgttaggactgttgtaaggaacagatgcctttaaaagctcagcatagtatctgacatatccaagtttttttacatgcagagaattacttttattctatagggaacatgctactgttatcaagcaaaagtggctcactgcctgatgtgctagaggccaatactgtgacactggagatttgtcgggggaaaaaagccctatattgcaggtcaactcacaaggagacaggagtcaagctcaaatctgtctccccatgctggcttcaaggcagcattattattagaaaaggttcagggagtagatcttgagattagtaggtgattggaagaaaagaggagatctagaaagtcactgggcatgcataattatctattcatgctacatcatgggttgcatgtgccaatttagggagagttagtataaaacatggtggaaattcaggctgtgacatcagcaagctcattctgtgcaaactccagtctgccatactttttctaaccgatttcagccagttctttcataagtggagggggagtctccatgtttcagcaagctgtttcttttcttgtctgccatcctacaaactcaataatttgttagtcattggtttaactctttggggcacgttccttaagagtacaagaaaaggtttgagatccttgatgaggctaccaggaattttgaagaagggagaagagtcgaaagcaacatctcagtaacgagtcctctctctgcctccccaggctgtggaaatggcagtaccctgtgcaaataaggaagctgctggaggaagtgcagctactcaagccccgagtcgtaattgacggtagttggcattcttttgatgaagatgaccggtactggtggaaaaactgaagatacggaaacctgccccactcacacccatctgatggaggaactttaaacgctgttttctcagagcaagctatgcacctgggagttccttctcaaagatggagaatgatttctgattctcacaaagccctcaatggtagtgattcttctgtgttcactctacgttggttactggatttgaaggctagagaccttcaagtcataggactcagtatctgtgaaatgtccgtcatatctcagagcatatagagggaattaaataaacacaaagcatttggaaaagttgtcaagtggttttcttaactagtggggatatggtttaggagcagagaggttgggaggacctagatcttcaaaagcagcccctgaatttgggtaccacaactagtggtggttttttgttttttgtgtttttctttttgttttttgttttttttttttttttgagatggagtcttactctgttgcccaggctggagtgcagtggcacgatcttggctcactgcaacccctgcctcctgggttcacagcattctcctgcctcagcctcccaagtagctgggaccacaggcacccgccaccacgcccggctaactttttgtacttttagtagagacagggtttcaccatgttggccaggatggtctcaatctcttgagctcgtgatctgcctgcctcagcctcccaaagtgctgggattacagacgtgagccactgcacctggccaactactagttttttaaagcacatacctgaataccaaaggatggtgttactgtcactcaatatctgaactataaacataaagccgaatttattccttagtgtaatgaaaagctggtctaccacagtatctctgagtagagcagacttctgatctttgtggggaggaatttggggaggtacagaatgaggctaaaccttgaaggtgtaagttggcctgtggttactcaggtgaggctgattggtagaggtgtgttcatcagagtgcatcccttctgactggctgaatttccaatgcaaagggcagctgttgattggcttgcaaaagcatgttcactgaggtaagttgtcttggatccatttaatggatttaaacctgtctaggtagctacttattaccatggctacagaaccatcagtctattcctagaagagtggaaaactcttacattcttaccaaaatatacttcttatgatttcttgtatttatttctctcatccatgatgacgatgatgaatgatgataatctaacacagccctgtataccatgccctgtcctaagcagtatgaattaacttatttggtctttacaacaccttagaggtaagtatattttttgcttccatcttacagatgaggacattgaggtgcagaaaataatgcacagcaaggccgggcggggcagctcacacctgtaatcccagcactttgggaggctgaggcaggcggaacacttgagatcggtggttcgagaccaacctggccaacatggtgaaaccccgtctctactaaacatacaaaaattagccccgtgtggtggttcatgcctgtaatcccagctactcgggaggctgaggcaggagaatcactcgaacccgggaggcagagcttgcagtgtgctgagatcatgccactgcaatccagcctgggtgacagagcgagactccatctcaaaaaaaagaatgcacagccagtaagtagcagagctgccattcagacccaggaaatccatttctggagttcattctactcattgaaatgttgcctctaccatacaaccaccttccacgagccattcactgtactgtgtgtaaacctctaactccagcagcccctttcaaaccgggggaatgttctagcatcattccctgtcagcgtatattagacaggggctggcatgcccccttttctgctcccattgcaatggagctaataaagtttatatcagatataggaggaacgtcaactctgcagtttatttgtggttatagtattagcattatcttcaacctatggtttctttgcaggaatactttttaaatacttgtgtgttctgggagtgtttgtttataaaatacttggacattggaccaatgtgatagggtttacgaggtgaatgggtgaagtagtgggggaaaagcccttccgaatcagagtatctgtcttcaggatacctcttctcccacatgggacacaggcccatctaacataaagacagggcaaggaggccgggtgcagtggctcacgcctgtaatcccagcacttggggaggctgaggtgggcagatcacgaggtcaggagattgagaccatcctggctaacacggtgaaaccccatctctactaaaaatacaaaaaattagccaggcgtggtggtgggtgcctgtagtcccaactacttgggaggctgaggcaggagaatggcgtgaacccgggagacggagcttgtagtgagccaagatcgtgccactgcactccagcctgcacaacagagccagactctgtctcaaaaaaaaagggggggggaggggggcaaggaaaccaccattaatgtttgtgttaacaaagcattactatgttagtcttgttaaagatctatcaccttgtatatagctaaaaatacacaatgccctcctgtgtccagtgcattatcttgagcactgctgcctaccccacccccaacagttacaaatatcccactttgtaaagttacagccaaagggaaggtcaaagggaaaagccaagtttagaaacaatatttttattttttagaaacatctcattatcttgcccaggctagtcttgaactcttgggctcaagtgatcctcctgcctcagcctcccaaagttctgcaattacaggtgtgagccactgtgcccagcttcaagttttttatgctgacctgtgttcaaattctggctgtttcgaatgatttttatgacactatacaaatgtcaacctccatgggcttttgatttcttatctgtaaagtaggaaaaattgtacttaccctatagaatcaagaagagatgaatctctgtaaatcagctgtagaagtggctggaacattcactccaccaatatttacctacttgtattagttgtttgttgctgtttacaacattaccacaaactcggcagttaaaacacgtgatctcggtgtttgagtccagatatgactcagctggatcctctgtctcagggtctcacaaggctgcgatgaaggtgttgaccagggctgtggtctcatctgagacccaaccgggacaaggacctcttccaagttcatgcaggtcccaggaacatccattttcaggctgctggactgagggccttggtttcttgactgtcagccccaggccatccccagctcttttctgcttggccgtctccatatggcagattggatcttcaaagccagcaaaacagtcactcagcaagacagacttacaatctcatggcatcacagaagtcagatcccatcaaccctgccacattccgtttggatagaagtaagtcacaagcccctcccacacttgagggaaggggatctggcaagatgggaacaccaggatgaggatcatgaaaccgcctagaatctgatgcactactccacactggcagaaagctgtgttctactcactgctgcctgttggaaaagagtttctttctcttgagcctcttggccatttccaagggtagagggagttacccaggtgctacggctaggagggaggaactggaccttctaagtgctcttcacaagcctcctgtctccagatgtgtacacactttcctctttcatgcagcaagctttgctgagggtgggatgggtgggcggaatactgattgtggcgaagtgctaggaggctgcagatacagaccacttgcctcagagtc[132 bp omitted]tgcaacctccgcctcccgggttcaagcaattctcatgcctcagcctcctgagtagtggggactacaggtacccgccaccacgcctggctagtttttgtatttttagtagcgatggggtttctccatgttggccaggctggtctcgaactcctgacctcagttgatccacccgccttatcctcccaaagcactgggattacaggtgtgagtgaccatacccagcctggcctcagagctttgaataatagggatgataccttgatttctacccaactccttgtttcttattctaaattcctaaacgtagaggatgaagtaatgatgagtctgtataaaccctataaccctatgtgctggccgctgccctcaggctgatagtgcaggacaaagatccctgttctcctaaaatgtattaccttctaatgaaggacaaatgcatgaattgcagctgttctcacagctaaaatggcaggttcgcaagagactaggactattctatttttctagactagctatctttgaggtctgagaaaaacttttttctgcactgctggtttttcgtcaagtttgggacatgacataccatgaaaatgtacccttcctacatagtttttcgttttgtcttgttgtttgtttttaacatttgtaccacggggagggaagagcatcaggaaggcaacggacccggtcctggagggcaaccgtggggagtcccaggcccccgctgcctggtgcatcacatcgtgggtaggacaggtgggagcgctgtctccctgctgatctgggctcttatctctatgaggaaggaccctttcctcacccgtgagtcaaacgatagagaattcacctccacctgccagccacgctgtagctggggtgtgtgtggagccgcacaaactctgatgctttgagctgcatggcacagaacgtccacctgagatcactgcgtagaagcttcctgggaaggcaattccagggtcagtgaaccccgcgggacgccagctccctggttgagtttcccctgatggccgctgggtggcagcagagcgtcatcttccctgagaccctcccgggagcagggcgggctcctccccgcatccccactgtggattttctcaccgcaggcactgctgacggtgggaccggccacttccacatcggggtcccgcctgtgggctgtagggtgttcagtgacgtccctgcttttacctgccaggtgccttccctcccgcagttgtgacaaccaagaaagtcttcagacacagccggatgttacccggggcaccagcctgagacccgctggtccacgggaagcagggagccctccctcaccagcacacccagcggcctccccttcccctcgccggacgcgactggctcacaggaaatccgtgtcagccctgctcagaaggtatcagccacttgttggttctattggaggtgacagctgcttagcagacacccaagaatgtaggtttgttctttagctttattccccattgtcaaaatggaatcaaccaagattatctggaggcccaggtgtaaaatgaaaatgtgggtgctttgttcaaaaattaagaatttcaagatgactgtgagtcactatactgagtgcaaagccattctgagccggggtcctggatgaatgacccaagcagctggcctccattgcagctgactggaccaggagctagcgtttgaagaacagccagtctttaagctgcctaatgacctgtaggccgcctgtgaccaaggtaagagatgaagtaggtatccttgttcacaacagccaaaaggtgcagacaacccacgtgtctatcagcagatgaatgggtaaacaaaatgtggtctatccacacaatgaaatattattcagccatgaaaaaaagaatgcaggctgggtacagtggttcatgcctgtaatcccagcacttagggaggctgagttgggaggctcacttgaacccaggaatttgagaccagcctgtgcaacatggcgaaaccccgtcactactagaaatactaaaaattaaataggtatggcggtacaagcctatagtctcagcccgttgggaggctgaggtgggaggatcacttgagcctgggaggtcaaggctgcagtgaaccgagattgtaccactgcagtctccagcttgggtgacagagtgaaaccctgtctcattaaaaaaaaaaaaaaaacaacaggtgcagtggctcattcctgtacttctagcactttgggaggctgcagcaggcaggtcacctgaggtcaggggttcaagtccagcctggccaacatagtgaaacctcgtctctactaaaaatacaaaaattagcccagggtaatagcgtgtacctgtaatcccaggtacgcaggaggctgaggcaggagaatcacttgaacccaggaggcggaggttgcagtgagccgagatggcaccactgcactccagcctgggcaacaaagtaagactccatctcaatttaaaaaaaaaaggaataaaggaatatagtagcgatacgtgctacaacatggatcaacctcataaacattatccactgtaaagaagccagatacaaaaggccacttgtatgattccattgatatgaaatgaccagaagagggaaatccacagagacacaagatgagagtttgcccagggctgggagaggagcagggaatgagtgactcttcctggcacggggtttccttttggagtgatagacgtacaactatgtgaatatactaaagcattatttaattgtacaccttaaaatgggtgaattccatggtttgtaaattattttttaaaaagcaaaaaatgatgaaccaatatagttgcctccatctgagatctgattcagaattcctgaggaaataaagcagttaaaaggcaggaaattaggctggaaatttattagtgaaagtggaagatgtggtttgcagagtggagagagctcagggctgtacttttatgcagggggtgttatcagcacagtatccagggcttgtgaagttttcattagcctgaaaatatcttagaaacctggcagggtgtggtggctcacgcctataatcccagcaatttgggaggccaaggtgggtgggtcacttgaggtcaggagttcaagatcagcctggccaatgtggtgaaaccccatctgtattaaaaacaaaaaatttagctgggtatggtggcaggcgcctgtaatcccagctgcttgggaagctgaggcacaagtatcacttgaacccaggagacagaggttgcagtgagccaagatcatgccactgcactccagcctgggcaacagagtgagactgtctcaactggggagagagcaagcttcaggttcctgagccccacggccaattctggtatggcgggacccaggtgaagcctgggaatatgaattttaaaaagctttcctaagccattctgatgcaagtgctcttcagatcacactctcaaagccagaactgcaaaaacgaagctctgagtgtaccacaagtgttggtcagagagaatacgggctggagggtgaggaccctgtttgatggagacagaaaagagaaggaaactctggaggagaagagcgaagacaagtcctgactaagaccataaaccaggggttggcaatttttttctgtaaaaggccaaataggccaggtatggtggttcatgcttacaatctcagcactttgggaggccaaggcgggagcatcacttgagcccaggagttcaagaccagcctgggaaatgtagtgagactctgtctctacaaaaaataaacttgaaaaaaaattagccaggtgtggtagtgcacgcctgtggtcccagctactcaggaggctgaggtgcaaaaatcacttgaccccaggaggtcaaggctgcagtgagccatgatcgcaccactgcactccagccagggcaacagagtgagatcctgtctccaaaaaagagccaaacagcaaatattttaggctttgggggccatttagtctattgtaactgctcagctctgctgatacagggtaaaaacaagcataggtctattgtaactgctcagctctgccgatacagggtaaaaacaagcatagaaaatacaaagagaattttgtcacatgcaacatggatgaacctggaggatattacattaaataaaatgagccaggcacaggaagatacagatggtccctgacttgtgatggatttgaccttacttacactggtgtgaaagtgacattcgttcagtaacaactgtccttcgagtacccacagaaccatctgtctttcactttcagtatgccatcaatcacatgaaatagtcaacactttattataaaatggactttgtgttggatgattttacccaactggagaataatgtaagcattaggagccaggtgtaaggtagggtaggctaagctatgaccttctgtgggttaaatatattaaatgcatttccctagactgggcaacatagagaccccatctctaaaaaaaaaaaatttgttttttaattagccagacgtggtgcacacctgtagtcccagctactcaggaggctgaggcaggaggatggtttgagcccaggagaccgagactacagtgagtcatgattgtaccactgcactccagtcatggtgacagagtgagacactgtctcaaaaattaaaaagtattttcaacctgtattttcaacttatagtgggtttatcaggacgtagccccgttgtaaatggaagagcatctgtattgcatgatctcagttatatatggaatctaaagtcaaactcacagaagcagagagcagaatgatggttaccagaggctgaaagtgatggggaggtggagtctggggaggtgttggtcaaaggatataaatgttgatgttacaggaggaataagttcaggagacctattgtcgtacaacgtggtgactatagttaacagcaaaatatcacgtacttgaaacttgctaagtaagtagatgttaagtgtttttttgttttgttgagacagggtctccctatgttgcccaggctggtcttgaactgggctcaagggatcctcctgcctcagcctcccaaagtgcagggattacagtcacaagccaccacacctagccctgatgttaaatgttcttaccacaaaaaaaaaaaaaaaaaaaaaagcatgtaaggtaacgtacaagttaatcagctcaatttagccattccataatgtatacattttttttaatggagtattgctctgtcacccaggctggaatgcaatggcaggatcttggctcactgcaacctctgcctcccaggttcaagcaattctcctgcctcagcctcccaagtagctgggattacaggtgcccaccaccacacccagctaatttttgtattagtagagatgaggtttcaccatgttggccaggctggtctggaactcctgacctcaggtgatccatctgcctcggcctcccaaagtgctaggattacaggagtgagccaccacacctggctgtaaacatatttcaaaacagcagattgcacaccataaatatatataatttttgtccatttaaaattttttaattaaaaaaatataaacattttgaagaaaacacaaaagcaaatgggtgtggctgtgttctcatgaaattttattttcagaaacaggcggctggctccatttggcctttggggcattttgctgacccctgctggagatgaggatcttgcagaccagcttgtctgtgtttcctgtttgtcctggactgactgttcctctgttacctgcatttctgtaagggttatgagctgggtgccagggatcagtggtgcaatcctggaaaggagcctcctggcagcttgaacggttgagggtacacaggaccgctcaggttaaggccctagcccaacctcttgccaaacccgccacacactggacctgcttgtctgtgatagtaggttttatatatcaacatgcctgagccacggggttcccagattaagcattgtttctgagtgtgtctgggagggtgtttctggttgagattactgtttgaattcgtggacttagtaatgcagatttccctcccttctgtgagtggactcatctcatgagagtctgaatagaacaaaaaggtgtagagggagtcatttaccctgtttgctccccgcctgcctgttggagtggggacgcctatcttctcccgccctggaactgggatttgcacccttggctcctctggttctcaggcctttggacttggactggaaccaccccacaggcattcctgtttctccagcctgcagacggcagatcgtgagactcctcagcctccacaatcacgtgagacaattctcatcataaacctctttctctgttctgagaactgcatcatcagtcgtgtgcaaatatcaagtgtatttacacaaaactagataatacagcctaccatacacctaggctatatggagagaagtggcataatcacagctcactgcagccttgaactacagggctcaagccatcctcccacctcagcctcccaagcagctgggactacaggcatgtgccaccatgc[133 bp omitted]gaaaaccccatctctactataaatataaaaagcagctgggcatggtggcgcacgcctgtagtcccagctacttcgaaagccgagggaggagaattgcgggaacctgggagacggaggttgcagtgagccgagattgcaccactgcactccagcctgggtgacagagcaagactccgtttcattcattcattcattcattcattcatttagagacggagtcttgctgtgtcacccaggctgaagtgcagtggtgcgatctcagctcactgcaagctccgcctcccgggttcacgccattctcctgcctc[209 bp omitted]ggactctcgctgtattgcacaggctggagcctatttgctcttagagcctattgtttttaggctaaaacctggacaacatgttactgtactgaatactgtaggcaacggtaacacaacactaagtatttatatatttaaacgtagaaaagttacaacaaaataccaaagaaaatatttgaagatggtatacctatatggggcacttaccatgaatgaagtttgtagacatggaagctgctctgggtgagtcggtgtgtgagtggtgggtgaatgtgaagactgggacgttactctacactgctgtagactttataaacactgcacacttaggctaccataatttataaaatatttttctttcttcaagaataaattaaccttagcttactgtaacatttttactttataaacttttatttacttatttttgagacaaagtctcactctgtcgcccaggctggagtgcaatggtgtgatctcggctcactgcaacctctgcctcctgcgttcaagcgattctcctgcctcagcctcccgaatagctgggactacgggcacctgccaccacgcccagctaatttttgtatttttagtagagatggggtttc[132 bp omitted]actctcgtaataacacttagcttaaaacacaaacatagatcagacacgatggcttacacctgtaatctcagcacttggagagactgaggcaggaggatcacccttaggagttcaagaccagcctgtacaacatagaccccacctctacaggaaataattattttttaattagccgggcatggtggcacatgcctatagtcccagctacttgggaggctgaggtgggaggatcgcttgagcccagtagttcaagactgcagtgagctatgttcataccatgctctccagcctggacaagagagcctgactgtctctaaacacacacacacacacacacacacacacacacacgcatgcacacatgtgcattgtgcaactgtatagaaagattttcttgctgtacatccttattctataatctttttcctaatttctttaacgttttaatttttgattaagaaagacacacacacacattagtctagcctgcacagagtcaggatcgtcaagatccttctcttctaactccgtatcttgtccccctagaaggtcttcaggggcagtgacatacatggggctgtcttcttctatgacaacggttcttctgggttcctccagaaggacctgcctgaggctgctctacaattaatcggtttttttttttttgtaagtaggagtatgctctaaaataacgtttaaaaattatagtatacccaggggccgtggctgacaattataatcccagcactttgggaggctgaggcgggcagatcacttgagctcaggagctcaagactagcctgggcaacatagtgagacccatctctaccaaaaatacaaaaaaattagccgggtgtggtggtatgtgcctgtggtcccagctactcaggagactgaggttgggggatcgcttgaacctgagacgcagaggctgcagtgagccaagattgcgccactgcactccagcctgggtgacaaggcaagactccatctcaaaaaaaaaaaagtatagtaaatacatgaaccagtaacatagtcatttattaccattatcaagtactaagtgctgtacataattatatgtgcaatggcgtgatcttggctcactgcaacctctgccttccaggttgaagcgattctcctgcctcagcctcccgagcagaatagctgagactacaggtgtgcaccaccatgcgcggctaattttttgtttgttagttttgtgtgtttttgttgttgttgttttttgagacagaatcttgctctgtctcctaggctggagtgcagtgacaggatctcagctcattgcagtctctgcctcctgggttcaagcaatcctgcctcagcctcctgagtagctgggattacaggcacgtgccaccatgcccagctaatttttttatctttggtagagatggggtttcaccatgttggtcaggctggtctcgaactcctgacctcaggtgatccgtctgcctcagcctcccaaagtgctgggattacaggtgtgagccaccatgcccagctaatttttttatttttagtagagacgggatttcaccttgttggtcaggctggtatgtgcccaacttttataccattggcagcacagttggcctgtttaccacatcaccacacgcatgtgagttgtgcattgcactgtgatgttacaaggcctatgacagcaccaggtcgaagacattttccagcagcataatcttatgcgaccatcatggtccgtgcagcccattgtttggaatgtcatgcagcacatgactacacgcacacatacagaatattgattctgcttctcgaagaaccctaatgcattttccacactggcagattgtctgtcttctaagctacagcagcaaccaaatatcatgaatgctttttgggttcctaactctagttgggagtcccaagtgacttactgtggttaagcccccagaatgagttgtcaaggttcaggctctgttgatgatgaggaagaagaaccaggaccacctaccagttacctctatttgacagtcacttggctcagttctttggcttgggggtgtgtgtgtgtgtgtttgagacagtcttgatctgttgcccaggctggagtgcagtggtgtgatcttggctcactgcaacctccgcctcccaggttcaagcgattctcctgcctcagcctcccgagtagctgtgattacaggtgcatgccaccacgcccggctaacttttgtatttttagtaaagacagcattttgctgtgttggcc[141 bp omitted]tgcgagataaacatcatttaccatctttaaaggacgaaaaagctggagctcagaaaggttggtctcttgaacaggatggtaagactcgtacgttgctgaccaggaccctaaagtttttcccctaccaccaccatatactcttcatgagccatcctttcccaaataacctaaacacacacacacataaggaaacagcacttgctatacaagcaagtccagcttcaagacaagccccaggctccgctcaccatgcagaatgctgggcctaagctcctcctgtgtggaatgctgaagaaatcaccacccttgatgcaaaacgaggcctgtctcaaatcagcttgtggtgactgaggcaaaggtgggaatggggagtgactgtctaatggatacaaggtctcctttttggatgacaaaaatgttttggaactagacagaaatgatggttctacaacactgtaaatgtaccaaatgctaactgaattgtgcactttaaaatgggttcattttgttatgtgacttttaccagatgaacaaaaacactgtctatctaacacagatccatgcctttacatggtatgttatataataacactttaccgtcctttatccaggaccacgacttcatttcacagacactgcagttctcaagaatccaggtggtggcagcagagagctgagagaaaccagcacttccctaccggccctaaggaaggtccggaataagaatattgaccttgcccagttgcagtgagcatttctgtattgcaccagtcacagtggcgaatgcagctaaggagaggcaggtagatggagccacagaaccagatgtggtctgggcagtgtttcatcccaccaggaatgacagtgcatctgcagctcccagagggctctctgacaccctacctccaactgtgagcaatcatctttacctcctcatccagaggaaggaggccagcgggatgcagagcctcagcagcttcagcccaggctcagggctgaagtggagaagcatccaggccagttctggcattggtggaaccagctgggccgggggttgccccaggtaaaaggaacaggacccatcactgagaccacaggacagagaacactgagaatatagactcaggtgagatgcacggttgaggctcgtttggtttctgagaaccagcatgttggattatacccagaataactaatcctttgcccaattttcccattttccctcccagacacaaaataggacttactttccggctccctgaaagctgggcatggccatgtgccttgctgtgggggatgaacccagagcagaagaagtgtgtgtcgcttctggctggagacttcaagagcagtacacgatttgccaagtctctctgcctggccacggcaaatggtgagtcccagagagttgacaacgtggagcagagctccccgcaacccatggcaggcacggaacacaaacaagataaaatgttgagtgttgtgagcccctgacatgggggctgtttgcttgcagcataaccggtcctatcctgacacacgcttggggttgggggtcacaaactcaaatgccaggcaggcgatgtgagggaccacgtgggaaagagtgggtgaggacttgttcaaacacaggtgacaggctgggtgtagcggctcacgcctgtgatcccagccctttgggaggccgaggcgggcagatcacctgaggtcagaagttcgagaccagcctggccaacatggcgaaacctcatctctactaaaaatacaaaaattaggccagatgcagtggctcacacctgtaatcctagcactttgggaggctgaggtgggcggatcacctgaagtcaggagttcaagaccagcctggccaacgtggtgaaaccccatcatctctactaaaaatacaaaaaattagccgggcgtggtggctggagcctgtaatcccagcgactcgggaggctgaggcaggaaaatcacttgaacccgggaggcagaggttgcagtgagccgagatcacaccacttcactccagcctgggtgaaagaagctccatctcaaaaataaaaatttaaattaaggcagatgccgggctgtttaccagtccagcttttctgtacctcacctccgatttctgtacatctttcccttttttatgtctacagatcttgcaccacatggtcgcgctggagtctctgtgaatcggctgtgattctgggggctgcgtgattcgcgaatcattcattgctccattaaactcctttaaatttaattcggctgaagtttttcttttatcagagaggagacatgtgagacatgttccttctctctctgcccaattttcctgttttccttcccaggaggacacagggagaaggccaccgtccgcacgctgggaagcagccctcaccagacaccagacatgccagcaccctgatcttggacttccatcctccagaactgtgagaaattagtgtctgttgtttaagacacacacactacgtattctcttagagcagcctgaacagactaagcaggggtgtccaaggtagagaatacagtcataggttctcagtttctgtttgcggttggaccagtaaagacccttcctcatccctcttttccacttatcactagagacagaaactaaaatccatgatttcaggctgctaaaagcctaaaacagaacagcaacaaaataaggtgggttggacgagcttggtctacagcagtatgttttatttggttctcatggaggtattccactgtttttctttcaacatactgttgctggcttgaatcatggagatattaaggaagaaagtctaataattatgatgttacatgttactaaatctgtcttgccagcttctctatttaaaaaaatatatatatcaggccaggtgcggtggctcacgcctataatcccagcactttgggagactgacgggggcagatcacttgaagccaagagtttgagaccagcctggccaacatggtaaaaccccatctccaagaaaaataaaaattagccagggtggtggcgcacacgtgtggtcccagctactcaggaggctgaggcacaagaatcacttgaacctgggaggtggaggttgcagtgagccaagatcatgccactgcactgcagtgtgggtgac[131 bp omitted]ggctaacacggtgaaaccccgtctctaaaaatacaaaaaattagcccggcatggtggtgggcacctgtagtcccagctattcgggaggctgaggcaggagaatggcgtgaacccgggaggcggagcttgcagtgaactgagatcatgccactgcactccaccctggacaacagagcaagactccatctcaaaaaaaaaaaatgaaagctctggcatcgttaggtctgacttcctactggtgaccacagtcagtgtaagctggaaacggagctcctttctcctgggctacagtgctctggtttccccactctaccatctcacactggctcccttattagcctggtgctctctccagccccgtaggatgcacttgtaaccctgaatccaccccatgcacggagctggatggtttgggcacaactccctcttttggctttagttgaaacactcattccaggctcttggttttacaaatgagaaaatggggtttagcaaagagaaatgagttttcaaaccagaggccagtggttaggctgtgcagccacctctgctctcctcccctccctgtgtcagcagggatattccggagcctggtctgaaactgctgagctcgaagggcttggatccaacagtgctgatcatgaccacggaggtatggcctggtcactagggagagagctgagctcgaggggcttgtgtccaacagtgctgatgaccacagcggtgtgtcctggtcactgggagcggctgggctctaggggcttgtgtccaacagtgctgatgaccacagcggtgtgtcctggtcactgggagcggctgggctcgaggggcttgtgtccaacagtgctgatgaccacagcggtgtgtcctggtcactgggagcggctgggctcgaggggctggtgtccaacagtgctgatgaccacagcggtgtggcctggtcactgggagcggctgggctcgaggggctggtgtccaacagtgctgatgaccacagcggtgtgtcctggtcactgggagcggctgggctcgaggggcttgtgtccaacagtgctgatgaccacagcggtgtggcctggtcactgggagcggctgggctcgaggggcttgtgtccaacagtgctgatgaccacagcggtgtgtcctggtcactgggagcggctgggctcgaggggcttgtgtccaacagtgctgatgaccacagcggtgtgtcctggtcactgggagcggctgggctcgaggggcttgtgtccaacagtgctgatgaccacagcggtgtgtcctggtcactgggagcggctgggctcgaggggcttgtgtccaacagtgctgatgaccacagcggtgtggcctggtcactgggagcggctgggctcgaggggcttgtgtccaacagtgctgatgaccacagcggtgtggcctggtcactgggagcggctgggctcgaggggctggtgtcttaacagtgctgatcatgaccacagatgggacatggtcacaagggggcgccacatcccactttcctaccctaaccgcctcctcccccctcaactttcttccagctggggcgctttgcatttgtggctattggtgcgtgtgaacaagcgctccttgcgccccacagggcctctcccctgctgtggcgccgcctggaccacgcttcctgaactgcccttggaagttcccctctttcctcgcggctcagcttttccgtccacttactcgcccgtgtttatcgggcacgcacttcctgccagtggctctgctaagcaaggggacacggcggtgacctcgacaggcacaatctctgccctcacggggagtgggagtggttgcggggggggacacacacagatgatgactgaagagacaaaaagagacccctgggggtgagacatggaggaagtcctgggcatgggcaggtgtgacaggcagctgtgtgggaggcgggtcccaggggagtgagatccagacagacctgggcaagaggaaggggaccctccacccagctcacttcctgctctgaaggccgcagtctgtatccctgagggcagggactagcgtgtctgccccgctgcatccccagtgcctggagcggacgacgagtcgagggtgactccaccaggcggctacggtgtcaaagcagctccggcgtggggtccgactgtcctgagtttgaatcgggttctccatttactgagcgtgtgatctaaagtgagtggcttcacttctctgagctggctggcttctctgtgaccagcgacatccagccatgtctaaacagtgtgggcaaagccaggcagctgaaaccaactttgctgtgtcttgttttaagtcctggagaagtcccttccctctgagcctgctttcccgtctgtagagtggagggttaaaagaggttgttttgttttgttttgttctgttttgttttttgagatggagtctcactcttttgcccaggccggagcgcggtggcactatctcgaatcactgcaacctgtgcctcccggattcaagcaatttcctgcctcagcctcccgagtagctgggattacaggcgcccacccccacgcccagctaattttcatatttgtagtagagacggggtttcgtcat[138 bp omitted]acattgaaccgtcaccttgctccccagggtcccagctatcagccatatccaagccctcactgcggagagtagataggagacagtcacttcatacattcttggggacatgataagcgtctgacctctggggagggtgatacagctggatctgttgggatccaaacgcacattccccttcatcttacagttcctgtcaggacaagcagcacagggtatgggtcggatttggtccgattcttcctgctgcattggtacagtagcagaagactagaaacaggcagactgcacgtcagtcaggaattaaacactgtgtctgcacaaaggaacgctttgaaagtgttttttaaaataagaaatgtagatagggctctttggaacaatcataggtagatacataaataggtatagttgatagatacatagatagctaaagatagatgacagataacagatagggtacacaaatagattattgagagataatagatggtgaagataggaagatcacagatatgtactatggaggtagatgataaattgacacatatctatgtaagtagataacagatgatatacatgtatgatatagattatagatgatagacacatggatggtgtaatgataatagatgacagatgactgatacataaatgatagctacatatagatgacagatatagataattgatgcatagagggaataatagaagacaatggattggtatataaatgataatatatgtagatagatgatgtatagtggatatatacatgatacatgatgatgatagagatacatatgtaaggggcagaataatatgcaaggaatgctttcatttgataaatttattttatttatttattgagacagagtttcgctcttgttgcccaggctggagcacacttgtttgtgtttatttattttagtttttgagacagagtttcactcttgttgcccaggctggagcacatttgtttgtttgtgtttgtttatttattgagatagagttttgcttttgttgcccaggctggagtgcaatggtatgatctcagctcaccgcaacctctgcctcccaggttcaagcaattctcctgcctcagccccccgagtggatgggattatagccatgtaccaccatgtccagctaattttttgtatttttattagagacagggttt[133 bp omitted]gattcactgagtatttcaagggataatgcaggaagaagaatgaggaatttgggagttgagatttggtaagtaatctcttcctcaaagtatccattactttttttaaaaaaatcttatttgtgaccaaacatcaattgctgatccaaatccccctgccagagtccccaccagcctgaatgaggctgtccgtccacagtctacttgctgtcatggctagtggccaccccacttcacaagcatcccataaggtacagatagactgatctaagtgttggcattagattctgactattaagctctgctacttatcagctgtgagagcctggaggactatttaacctccccaaagcctctgttcccttatctgtaaaataggaacaataccctcttcgaactgatcgggaggcgttaaaagggaacgcgtatggattaaactgagctccatcatcccagactcagctgtgggggtgggggtggggggtggggtggggggggggggggaatctctgtccatggtgctgaaagaccggcgccagaaaatagggaatttctggatagacttgtccatcaaggcaggagaggaggcaaaatcaatggtgccagaggcaactccgtccccacccacagcctctttgagtggtagatatgaggggaaggagggtggatgtataccacagacacacacatacccacatgcgcacagacatacatatgcacaaagatacagatgcaccatccacacagacatgcattcatacatgcagagacacacacaattcacatgcatgcacttctctaaggatggcctggagtacaccagcccaagatgctctataaatggaaggttttctgacagaacaagttcagaaaatgctgcatgttttcacctacccctgccctggcccccagccccacccgggtatacagaatcatagtggaaagttctgagccgggtgggtgtggggggctagttttataattcatccagtcgactaaatcttggctcagcaccttccacctgccaagtactgttctgtgtatgagaaaatttcaatccggcagggtgcagtggctcacacctgtaatccctgcactttgggaggccaaggtgggtggactacttgaggtcaggagttcaagatgagcctgaccaatatggtgaaaccccatctctactaaaaatacaaaagtgagccgggtgtggtgctgggtgcctgtattcccagctacttgggaggctgagacagaattgcttgaacccaggaggcagaggttgcagtgagtccagattgcaccactgcactccagcctgggtgacacagcgaaactccgtctcaaaaaaaaaaaaaaagaaaacttgaatccagcattttcccaggttatttgaatacaagatcctgttttctccaaacatcttaacaatattccctggaacctacactctccaggctacccttagggaaacggggctgtatggaataaaatcatttccagatcaacactgccttcaggctggggagtaagctgggtggagggtccctttccactcacctgtctggccctcactccccctgggattgcctgtcacacctgccccctgcccaggactcctccacctcctgcctcctgagagcctctttttgtcccttcagcccttagctgtgtgtatcccctcccagcccccatgacagcagagatttgtgcctgttgaggtcactgctgtgcccccatgcttagcagagtccctcacaggaaagaagtgcccgataaacacctaagattaagtggattatcaactcagcagggggccgggggtggggggcatgggtgtcaggactttagatccagattaaggttctaccactttacaaaccagtagcctgggcaggctgcttcctctcctcgtaccagcttcagcagcagcagccgaggaatgatggcaaccacacagggcctttgtgaggactggactccgtaaggggcgtgaacgagtctgggcgtgccctccaccaaagtgagcatgagaggaatgggggccgaaggaacttctgcggtcactgccagggtgggtttgtgagcatggagcggccgcctagcctcaccttgccgtgggtgagcagctccaatgcaggtgaactacagggccgacggcaagtgccacaagaacccatgttcctttctttacctgggacccacgccgtgcctactgggcacggagctgctgcccaaaacacatttgtagaatgagtgagtgaggggtgggcaatgactacctgagtgcatgaatcagtaacggacagcgtgtgacaccaaagcacaggtcaggtgttgggtccggtgcaggctgatgtcaaggtggtcatgtgagctcgctcagttctgtattacaaagtgggatgagtagtgcagagctgggatttgagcctggctcctcgcccctgcatctttgctcatgcctgggagggcagctccagtgagttaacacatggcttggggattcccccctccacacacagtcatacaaggcaggcaggcaagctctcctttccacagggcaggaagccaagggtcagagaggttagtccacttgcccagggtcacacagccttaaggggcagggtggaaacttgccctgaatctttcttgctataggtgtcagctcctgccaccatatactggagcaggtagaagaggctgacccgagactcagtgtgcccgacttatggggcaccgagctgccaattctaccagacagggcacctcccatcctcccaggcctccagaagtgcccaaggccagagctccacagaaggaccctaggagaagtgagcaatgcttcctcagtctttgctaacccagcccactctgaactgccaaggttcaccccctcctttcgagtgacctgaaatttcaaaaactgacatgcaataccaattatctaagcaaggctctggccacttgagaacacgcttttttgatccacaatcactccctagtcctctaacaaatcctccaggatctgtagaccatcagtggccctggtttctaaaccccctgcctccagatgaggccccaggaccctcctcaagcacatcagggtgtgaaagggcagattaagggctctaactggaaatccgaatttctccttcaagtccccctctactatgaaacccccaagtcaaagacgcctgcagcttgccgcctccaatcgctcctgagtaatcgcagccttcagccaggttgaaaatacccctttgggaccctcactgcggcctcccaaggccccaggaacatgggtcctcaggacctgggctgtgggtccaggaaaccagtcgccatggtcgagcccccttctgatcatgaacaacagcgctcacctggcagggcggctgcagcggctctaccggaccaagcccctcgggcacgcgcactgcctgaaatgccctaagcgctcggctggactgtggcatacccgccctctcccccagcccctggctggctcgtctgcctggcccctgcagcagagacagctgagcgcaccatcctcctcccgtagggggcggggggtcctgtccccggagcggcagccgccgggacctcatctcccagcctccttcgcagggagccgcaaccacgggaccagccccgtgaacgacccaggtagggggacgtgcgccctttgcagtcagagtctcccccagaagctggaggcaggaggagggtgcttttggggttaggggcgggggccacacgataggagtggaggaagccagccgcccctgtgagagggtggtagaagccgtgggggctccttcccctgcagcgggcaggcctggccctgaccagtccgccctgccccatctacaagcagctcccaggccctgtgagtgcccgcaccatagtgaggatatccgcggacaggcccccctgcctagagccctccgcgggcgacccaacgggccactcccggggcgcggctgacgctctgctgatgccccggcgagagcctccgtttacccctcttgcccttctccctcccggactcaagaaccacgcagagggggacatttggatagtgccgtttattgttccagcaccccttcctccaccacgcccaggcctgggacaaacgggcacccgcctcctgcggcgctgcctctgctacccggaatccaggaggggaaggaacgactcgagctctaaggatgggacccggaaggcagaaaaaaataatggattggggcgggcggggagtcaaaaggtgggctgattaaaagaaaattctaaaagagaaaagggcccctggttctcttccctctctgggatcctctaaagggcctggtttctccattcctcgcagcaccccccacccccgccccggacaactgaggaagagcagggaaaatggccttccgcttggggcctggtcgccactcggcctctgcagttctctccattgtctctccggctcgcaggccgataacttaggaagggcgggccaggctgagggggcagagtctcgaggcggagaagtgaacgggccctaatacgccccagtgcccccccacggacggcgcagggacagaggagggcggggagccggggatgccgcggggtccatcgcaccccgtccgcttctccctgggtctcttggtcttgcacgtcgtcgctcccgccaagcccgaggggccctgcccgcccccccccccgggcccctcccctaccggccctccccaccgcggcactcggggcaccgcccgcccgcggcctcgtcgtcgtcgtcctcctcctccccgcccgcgcggtagtagctctgtccgcagctgctgcagaccgagggcgcgcccaccgcgtggatcttcttgtgtctccggagcgcggcgccctgcacgaagccctccccgcactccacgcagatgtgggccggctcctcgccccccgccgccccgagcccgtccccgtgctgggcccgctggtgcgccaggagcccggccccgtgcccgaagcccttcccgcactccagacacacgtacggcttgggggccggggcgcgccgcgaccggggccccgcggcctttgcccccgcgcccgccatggctgccgcggccgcggccccctcgcccggcgcgcccaccacgatgatgccctcgccatcgcccacggggatggcgatctcgccgtccgccgccaccgcctcttcgggccccttggcccgccggacgctagccgccagcaccttggccgccacgccaggccccgacagctccgggtgcagccgcaggtgacgcgcgaggctcttgggctggctgaagccgcggccgcagcgcgggcacacgaagggcttgaggccgctgtgcgagcgccggtgcttggccaggctcttgctctgagtgaagctgcggccgcagtcggggcaggtgtagggcttctcgcccgtgtggatgcgctggtgctgcatgaggttggagctccagctgaagcgcttgccgcactccaagcaggcgtagggcttctcgcccgtgtggatgcgccggtgctgcaccaggtgcgagctctgcgagaaggtcttgccgcagtcggcgcaggcgttgggccgctcgccggtgtgcgtgcgctggtgccgcgtcagcttggaccagtggctaaagctcttgccacactcgttgcagatgtagggggcgggcggccgcggccggggaggcgggccggctgggggcgcagactggggcggggacagcttggtgggaggccagctggggacgtcgtcatcatccatgatgaggatgtccactggaaagcaagagggtagggggaggtgagtcaagagaggcaagggctccacgcctgccttggctgctacgctggcctcgggtgcctcgctccccctggcgcaggacctgccctggtgtcctcagagtgtgcatcactccctgcattttactaagtatttattacccctctccccagctaagacctcagctctgtgtgagttaagaccctcagtttacccccaacctctagaacaatgccccagacacagaaggcctggtctgtaaacaaccaggcaacataagaggcatgggcgaggggcgggatccacggaaggctcccagaaaaggaccccgaaacccaaaacaccagcctggacgccgggggcagaggatgaggaaggctcacgggcaaaggttccactaggcagaggggccgcagggcttgaatgcagccctggacacctggtcctgagccagggagtgggtttggcaccctgaagacgtgcccgccagggagcgatggtgtcacattcgggctccaggaagacaatcctggctgcagacaggtaatgggattggagatgagcatgaaagccccacctccgaacctgggagtaaaacctggctcaacgccacctccattacagaggctatggtcagcccctggtgtgggggctcctgtctgctcagtgaggacaattcgggcacacagggctttgcctgcacatctttacactgaggacgcccttccagcagtcaacgaggcctttcacacttctgcaccaggcctgcccctgggggctctcccgggagggatgggcttgcctcctccccagctcattcactcctgagaagggtccgtgtgcagcttctacatttgctctcccttggggcctggtccagagcaacagaatcaggtgggagggcctcagcaagtgcatctctgacccccgtggacaccccaggtgcaccccacagggttttttcaaagccatgaatcacaattacaacgttctcactcctgaccttactagactgtaagctcctaagtctctatcccaacacctggcacggtggtgcccagcacacagagcccaaacaccctcccagatgccacgctggcaaacacgcaaggaagggccatgacgcccccctgcgctacacacttcagcgtcaggtcctcataagctgggagcacaaaactgagcctttacaagggagaaactgaggcactagggagtcgagtcacagcccacagctacacgactacaaagtggcaatgcccagaagcgcattagtagactgggtccaagaaacagccatctaccactaactgcggccgcccaccgctaaatcccccacccacaggcagcacaccctacacgctaagggagtgctccacaaagtgggatcctgcgaccagt[132 bp omitted]tggccaacatggcaaaaccccatctctactaaaaacacaaaaattagccgggcgtggtggcgcatgcctgtagtcccagctacttggaaggctgaggcaggagaatgacttgaacccgggaggcagaggttgcagtgagctgagatcacaccactgcattccagcctgggcgacagagcaagactccatctcaaaacaaaacaaaaacgcttatgctcaggcctccctccagacgcactgtatgagaaagtgccgggccgggcctgtgcttcagcaagccccccaggtgattctgatgccagctccagtgtgagaatcactattccaaggcagagagtattcgaatatggctcttgaacctgcggcagaagaaaacactccaggtgaagtcaggaaggggggagccttctggagagatggcatggagcccactgcgttgtcaacataaatcaaaaaatgttgtaagttataagcacattacttaaagatgtagagagaattaaaaacaaacatcagaagctatttgccccggggcagtgtgactgaaggggacagaaagggacgggcaggaaagagatttgttgtcaccgtaaaccgagccatactatctgaaccttacaagtgcttctacgcctttaattaaaataactgctttgttttcgaagctgtgaagaaagaaagtgtagcaatgctccctgtgactcagctatgaatagcatttattcatgacgacatgaattctgaacacaaaacttgtgacacagtggcagctaagacaggggcactggggcgggtgtgcagtacgtggagagcgcagtgagtggagagtggggagaggatgtgggagccatgtcctcacctcccattagatttgcaactatcaaagcaatttcatgagctctttacctagaaccagggagaaccccaaagagtgcatggaggggctccttcctctagaggcaaactgggagtggggaaggcaggaggtgggagctgttttctgctttaggccgtaggcgatctggcttctctacaggcatctctgcactactttttctaagtacgagttaagcactgttaaatggacagggtttaattacttaaaaggcagggctcttttacatcttgcagattcctgggctctgcgcaaaccttcccgtgctgcatctcagtaaggcccaggaaaccgcgcttcacaggcacagactggtttctgacaagaggctgcgtctgcaccgcgcatgggccaagatgagccgctccacttgccgcagccgcagccgcagccgcagccgaagccgaagccgaagccaaagccaaagccgaaaccgaaaccgaagccaaagccgaaggcgaaaccgaagccaaacggaagccaaagccgaaaccgaagccgaagccgaagccgaagccgaagcctcaccctcaccctcaccctcaccctcacaggagcaatgaggctaacagccttctccacctcacagcaccatctttaaagggattcaacgaattcccagcaagagaagagcacggtgaggagcacaagagttctcattcaattaaaaaaataagaaacaatgagggccggggccactctgatggtggcagcagttacccttgggggagggcagtgtccccagacgcctggccctgggctaaatgtgttccgtggattaccacatttaatccatggccaacactatcactgtcctctcactgaaggactcagctgaggtcccgaggggatgggctggggggcggtcctccactccagatcccctacgccccaggctctacctctacgcctcctgccccacctgcagcaccactactccaggaagcccaggtttcccctccacgggagataaatgtttctagagcaaaatctggaaatgcttttttttttttttttaagataaaattcctgagttcacactgatacttcccatagaaattcaggactaaagttttcattcatccttttctttgtgacatctgcacctcccttcagccccacggagaatcctggttctcaaggacataggggatgacagaactggaatatcccacagacgcaggggatggcgggagtgggataccccacagacacaggggatgacagagctggaatatcctacagacacatgagatggcggaactgggataccccatagacgcagggggtggcggaagtggaatatccatagacacaaggggtggcggaagtgggatccccatagacacaggggatggcgtaagtgggataccccatagacacagggggtggcggaagtgggatccccatagacacagggcatgacgcaactgggataccccatagacacgagatggcggaagtgggataccccatagacacaggaggtggcggaagtgggctaccccatagacacgggatggtggaagtgggctaccccatagacacggggtagcggaagtggaatattccatagacacaggggatggcggaagtgggatattccatagacacaggggatggcggaactgggatattccatagacacggggatggcggaagtgggatatcccagacacaggggttggcagaagtgggatattccatagacacaggggatgacagaattgagatattccatagatacaggggatggcgaaagtgggatattccatagacacaggggatggcggaagtggaatattccatagacgcaggagatggcggaactgggatgccctatattacaaccctcttgctgggtgcacacgcgatctcagggtaacaatgctactgctaccactgccaggcacaactcctggactgtgctgcacgcaccgtcctccttcccctcagtgttttctcggctgcatcccctccgtcaggtgcaggtcttggccgactgagacatgttcgggctcaggagactgacctgctcacaccctcctcccatccctttccctggtcagttgtctgaggctcattcgcttttaggttcctcaggaagggcacagaggaacggggttcacagggctgttgctgggtagcctgtctgtacccttcccatctgaaggtcccttttccgtgagtcataatgccattttctcctggcataaagtgctaagtccgagcatagtcatgttgactttccaagtcttccacgctttctgccacgaaggatcggtgacttcctttagcgtccagcaattctaacgcaaccatctgtgatttgctctttcaatgcgcagctttcatgtgttaaggggtgttccttgaatgagtttttactatccgctctattcttttgctttgggtctcttcttcagggactctgcctatccatatgttggattttcttttcctaacttgtttcctttaaaactgttttaatcttttttcattttatttatttattttgagacgcagtctcactttgtcacccaggctggagtgcagtgacatgatctcggctcactgcaaccttcgcctctcaggttcaagtgattctcatgcctcagcctcccgagtagcagggattacaggcatgagccatcatgcccggcttttttttttttttttttttcattttcagtagaggcaaggtttcatgttggccaggctggtcttgaacctctgccctcaagtgatccacccgccttggcctcccaaagtgctgggattacaggcatgagccaccatacctggctaattttgtgtgtgtgtgctcttagtagagacagggtttctccatgttggccaggctggtctcaaactcctggcctcaagtgatccaccagccttggcctcccaaagtgctgggattacaagcatgagccaccacgccccgccttttttttttttctcattttaaaatgatcctccttcttgccttcaatttttttaaagaacgatgtttttattcttgagttccttctacattagtcttcattctgaaaggtttttgttcttatttgcaaatctttgccgaggctgccccctcgtttctgagtttgtgattatgctgttctttcacacgctgcactgcctcagctcgttcacaatcagcggcccccaacctttttggcactagggactggttttgtggaagacaatttttccacggacagggtggggaggtagcaggggatggttcagggatgaaactgttccacttc[132 bp omitted]gaaaccccatcttaacttaaaaaaatacaaaaattagctgagtgtggtggtgtgtgcccgtaatcccaactactcgggaggttgaggcaggagaatcacttgaacccgagaggtggaggttgcagtgagccaatatcgcaccatcgcactccagcctcagtgatagagcgagactccatctcaaaaaataagattctcataaggaacacacaacctagacccctcatatgtgcagttcccgctcctgtgaaaatctcatgccgccgctgacctggcagaaggcggagctcaggtggtaatgctcgctcatgcgccactcacctccccaagtgtggcccagttcctaacaggccacggagcagcaccagtaccaaggactggggaccctgtactaaatgatcttgatcttgttgggatgcacttccggcctgcctatctgtagaaatgccatcctgtcccttatcttttttattataatcacttttgggaaggttgaactcagtatttttctgttgctcattttatgtataagtttccttgaatttctaggaggcggcttggttcagggtagctgttctaacttctcagaggttctcacacagcaggtaaaaacgctgcaaccagcctgcacagatgcacacactccagccgctgtccccactgtcatcaggaccttctcctgccttcctctgttgccaaggacaggggccctgctcgattctgattcctcacatgaggttctgccctgcacagcactttacctggttgcttagagagctgcagggcctgagctgccccagccccttttgggccttcccaccagcctctctccccactaccctggtttggacaaaacagctcctacttcagctgctggtcctaaagtgaccccgactcccctgcccagctttgcagtgaagacctgcaggctgtctgtggctctcctctgcttccctcctcccagtcagatgctaacaccacacaggcctcggtggtttatcctcatccagctgtattttgcaactcatggggataacttaggacctagtaactttgcaactgtgatccagggaacttgagttttgctacctggttgccgtgtttttatgcagggatacaggagattcaagggccacgctgtggctgctctgccatcacccaacactcagaactgtcatctggccgggcacggtggctcacactcgtagtcccaactacttaggaggccaaagcaggaggttaacttgagctcaggaaattgagaccagcctgggaaacatagtgagaccccgtctctaaaaaaataaaaaaaataaaaaaataaaaaaaataaaaaaactagctgggtgtggtggcgtgtgcctggagtcccagctactcaggaggctgaggtggaaggacagcttgagcccagggggtcaaggctgcagtgagcagagatggcaccactgcactccagcctgggcaacagagcaagaccctgtc[134 bp omitted]aaaactacaaaaattagccgggcatggtggcgggtgcctgtaatcccagctactcaggaggctgaggcaggagaatcgcttgaacccgggaggcagaggttgcagtgagccgagatcgtgccgttgcactccagcctgggcaacagagtgagactccgtctcagaaaataaataaataaataaaaataaaacaaaataaaataaagagagatgagggtgcactgaaacatggagcccgtgctcacccgagggcagccagaactccagctgtaagacaccggctgaagctttcctgttggcaccgctccctcctcagaagcggaatgtctttatttcgttatctgaacagctctgaggctgcctgagctgtcgctgcccggtcccacacccctcaccctctcaacatcgggaactccatctggggtcatcaggagaaaaggccccaggaggcaggttaggaagcgccagtcagcctagagccatgggtctcaccctcctgagatcttcaggagccccggcctcagcctgcaggaggctgcatgccacccaccagcccccagctccacggcccaggcaggtgtctcggcccttttttcccagcacccagacctcatggggttttgtgcaaatccaacaaggtaaccacctaagggggctgcactgactgcaggcacacaggacgtgattatgaagtgccggccattattcctaccagtattagctcagaggatctgaacacacctcccagaaatactcaaatacagaaaaaaatcacaaaatttctaaggtttcaaaaacgccccaggtcaatctatctaaccagaaagaacactggctttgtggcttttccaatctcacatgcagttcttcaccgtgctacacgtgggaaacgccgtgctgtgaacttcacgcccaccacaggccacgcctcgcgtctccactgcgggcctcagcccggcaggcagtaggatggactgcgtggacggcggccagcatgtaaatgaaacggaatggaggcaggaggaggaaacacccgcacgtgctgctagcacaggaagaactgttctgtggaacttttattttggtctcctataaaatccgtacgtttctttttatctggctgtgttcctgcgtgcaggcacggcgcgagggatcaactacccccggccctgacggcaaaggcgctgcagagccagtttactaaaatgaaggaagccgagaccccagggacaaagccacctggcccaggggacacacagcaccctgctgtgccacgtctctcaggggccttctggtcatcagcaggggcaaccctactggagtgacctccagtaagagatggggtggggaggttcaaacctttggaatttcgggaggcttgggggagaagaggcatggagacttttgttcagacaacctcatgctgaagcccggcctgctaagcccagcaagggcacccccggtcagcacccgaggccccacccccgacccaggtctccagggacactgaggcaaagccatgggcctgggtgaaggagcctggggcccatacagctccatggaaggaacatgtgccaggggttcctggcacgctgctctccccacaacagccacagaaagctttccaaccacccaagcctccctggggacacctctgaacaggggacatggccgggagctacccacagtccaactcctttcctcttcacaagaaggtcccaagtgtgggctgcctgggattcctctggatcgtggggacccacctgccctggccagtgaggcctgcctgggagcttcagaacccattctcctctcacactcctcagaaggagaggcccaaagacaggcaaccccatgctgcagggtgatgccacccaggtaatacggccgcagggtgatacggccgcagggtgattacggccgcaaggtgatgccgcccgggtgattacggccgcagggtgatacagccgcagggtgatgccaccagggtgatatggccgccgggtgatggagcctaggtgatacggccaccaggtgattacggccgcagggtgatgccgcccgggtgattacggccgcagggtgatacagccgcagggtgatgccaccagggtgatatggccgccgggtgatggagcctaggtgatacggccaccaggtgattacggccgcagggtgatgccgccagggtgatacggccgctgggtgatggagcctaggtgatatggccaccgggtgattacggccgcagggtgatgctgcccgggtgattacggccgcagggtgatacggccgcagggtgatatggccacccgggtgatacggccgcagggtgatggagcctaggtgataaggcggcaccagagagaagtggcacagcaggacactgccggagcttcctggggacccaccacctggggctgaggcactgcctcggtgtggccaggacgtcacagcaaggggcccagagacaagcggctctcaggagagaggccaccctggatctgtcccgcctgcaggccagctgcccgagaacatatcaagtccttctgggctaggccactgctgtccgggttccctgtaatcagcagctgagagcgtccccactgcccagtggcttcccagggccctcgagccacactgccacatcccctgcagggcagcccaaagccccttcctccgtgaacgaagccttgcctggcccccaagacgggaccctctggttgaacagtctgcaccctgagcgacctggtgccccagggagtgatctccaggaagctgaaggacaggcacgcaggggaggggacatggggacatttctgctgagacagcatttcatggagcagagagctggcggaaggggacagaaagggggagtcacaccaggtgcggtggctcatgcctgtaatcccaacactgggaggccgaggcgggcagatcacctgaggtcaggagttcaagaccatcctggccaacacggtgaaacccagtctctaccaaaaatacaaaaatcagccaggcatggtggcgggtgcctgtaatcccagctatttgggaggctgaggcaggagaatcgcttgaacctgggaggtggaagttgcagtgagccgagatcgtaccactgcactccagcctgggagacagagtgaggctccgtctcaaaaaaaaaaaaaaagaaaagagagagagagaaaggacgagtcacacaacaccctctggggaagaaaactgcagcagggccacgcaggctgggggccgtgtcaggggtccaagaccagctgggaggcagacggggagacagtgtgtagggctgggaggctggacaggcggcggattctcgctcccgtcaagccaggacaccttcacagggttctgagcacggcgccgggatctcgcctcctccccaagaggctcaggaggggacaaggatagggacagaggtcgcaggaaggccagtgcgccgtgactgtgtgtaaggccacagggctggggccgtggtgggaagaagcgaccatactcgggatgtattcccagagcaggtgccgggacacacggaagtcaggagctgaggaagggtccggggtgagggcccgctggtccacggcatctaccccaaggcctctctgtgctgagtgcctgcagcctggctcgggtggcaccctccctctttggcactccaaccagcatctcctgcctccaacacaggacatagacaccctgccccatgacccagcactgcagggctggggttggcaagtgctcaggctgacacctcctgctgctggttctctctgcctccttctcaaccttccctaggccactgctcacatgcaggatggtgaaagttgcctcctccctgtctgaggaccccacaaggtaggctgagggcctggacgctaattccgcagaagaggctggggccaggtgggctgcgagccctgctggttcccttttctctgcctggcgggcatgctcccctgcccctccagggtatgctcctctccagatgcctgccccatgggcccccatatccctcagcaataggctagaggaaaagggaccacacacgccatggccaggccaacacccgccaccccacccccacctacgatgtctgtcactgtcacataggagggacgcacataagcgggaccccacatgctatggccaggctaacccccgccactccacccccacctacgatgtctgtcactgtcacacaggaggaatgcacgtaagcgggaccccacatgctatggccaggccaacccccgccactccacccccacctacgatgtctgtcactgtcacataggagggacgcatgtaggcgggactccatacgccatggccaggccaacccccaccactccacccccacgaacgatgtctgtcactgtcacataggagggacgcacgtaggcgggactccacacgccatggccaggccaacccccgccactccacccccacctacgaagtctgtcactgtcacataggagggacgcacgtaagtgggaccccacatgctatggccaggccaacccccgcctacgatgtctgtcactgtcacataggagggacgcatgtaggcgggactccacacgccatggccaggccaacccccgccactccacccccacctacgatgtctgtcactgtcacataggggggacgcatgtaggcgggaccccacacgggagttacgcgaacgccggacaccagagcagcttgggagcgtgcgcagcccatctttgacagccgagcaagggcgtcacgcaggggtgatgctccagaggcggcgccaagcgcaggccctccccggagccagctgcctggtgggggacaggactcccacagacgcagggccagggctgggcagggcagcgggctggacaaggggacctgacacctaccttctacaaagagagtgagtgtatgagtgacttgtaaaattaaagatgaacttactcaaagacaagcattttggagacaacgaagtattttaaaaaggaccgggtgctagattagatgaagttcctgaaaaatgacattttgttagatgagatcagcttcctgtagggctttttctttttttcaaggagtccttacatgttggagaatttacagacaaaatgatgtgatggatattttctctaaaacgctgtggaaagagaaccacagtgggcagaaagggaccagcagtgccgcgaatcgctggcgcaggaagagggattcatcacactgcgtccacacacttgagatttccacagaattaattttcgaaaaggttcgaaggccaaggatgtatgcgagggagaaggcaggggcagccctcgagggctgtggcggtgcgggatggcaaccacccactgagacgcggggcagcctggggccggggtgtgggccccctgggcatgcggtcctggcaacgcactcaaaacccccatcatagtttctaccccgggaccaaggctgccacagccccgcccacagggagcttctgttcatgctccatccacagatctcagaaatcactcaaaaaggggctgaggtgctttacaaaatcgatcccaaacttcaccccggtctttgtatgggacgactcagctatgccagcctgagctggcaagctctgccggcctttctgcatcaagtgtgcccacgcatttccgtgtggactgtggctgcgtggtatctgtgaggcccgcagcctgcaagatgaacagtatttcctctctggctctctgcagaaaaggtctgctgagccccggccagcgtggggccagcgtgggcctgggacctggggcctgacatgcagacacagcaaggagagaagctgccgcaccttattcctcaggtctgaggcagggaggcggcctccgtggaggggagggaggccatgaggtgtcaggggccacagtgaggtcaccatggggccttcgcaagcaaacctgggccccacgtagcccacaaatgagttttgctcaaccccaataatgctttattaaacaaacaaaacacattgccaatgtccaaaaagtgaaggatttcacataaaaacccaaactgacaactttccctgaaaagtctgcgtcagcctgcgggttccctgcactcctgagctttccctgaaaagtcggcatcagcctgcgggttccctgcgctcctgggccacccctggtgtaaggagtttcctgccagggagggccacaggcccgcctggaatcatagcagagggtccaggatgtggaggcggggctgtggggagaggaagggggcaccctcaacagacgggggtgctgcccaggctggaggggcaaggacagaggaagtcaggcagagaaggtggcccccaggggtccccaagatcatccagcagaaaggaaacttggagccacaacactagccctccctctacagccaggagtgcaaggcccagggcgggaggggaggccagggtcgggtggtcccagggccccaagaggggaaaacagggaaggggggtttcctcccacccagaggcaaaggaagccagggtcaggtgggaggcagcggggtcggctgggaaggcctctggctgctcacctgggttctcgtgactggccatctgctggtcctcagaatccagcggccccggagaccaggcttcttcccgcagctccatgtctgggtccctgttagaaggggatgagacagaaggacagagtttatggggtgccaggctgcaccgagggccctgcagggaggcagcctgcagaccccggcgtgacaggcacagcgcccggcagacaaggcacacagcacctaccccaggacaccgagaactggcctggagctagcctggccgctccccactgcaggggccagccaaggcctcacacagccgcaggaaggactcaaggaccctcaagggctacaaccaccgccagttcccatcccagccccaccactccccagctggacctggggcaagcaaccccacctcgcgcctcctcgcgcctcagcttcctcactggcaagatggagaacatgttactgtcaagcgtacacaagacagtgtacatgtggtgctcatgccaaacagggactggagttcccacacccctggcagatacttacccatcacagcagaaacagggcaacaggcgcctaagggtctctgcacacgacactcccaacccgtgccacacaccgtgagggtctctgcgcacgacaccaccgacccgtgccacgcaccaggagggtctctacgcacgacaccaccgacccgtgccacgcaccgggagggtctctacgcacgacaccgccgacccgtgccacgcaccgggagggtccctacgcacgccgccgacccgtgccacgcaccgggagggtccctacgcacgccgccgacccgtgccacgcaccgggagggtccctacgcacgacaccgccgacccgtgccacgcaccgggagggtccctacgcacgacaccgccgacccgtgccacgcaccgggagggtccctacgcacgacaccgccgacccgtgccacgcaccgggagggtccctacgcacgacaccgccgacccgtgccacgcaccgggagggtccctacgcacgccgccgacccgtgccacgcaccgggagggtccctacgcacgacaccgccgacccgtgccacgcaccgggagggtccctacgcacgacaccgccgacccgtgccacgcaccgggagggtccctacgcacgccgccgacccgtgccacgcaccgggagggtccctacgcacgccgccgacccgtgccacgcaccgggagggtccctacgcacgccgccgacccgtgccacgcaccgggagggtccctacgcacgccgccgacccgtgccacgcaccgggagggtccctacgcacgccgccgacccgtgccacgcaccgggagggtccctacgcacgccgacccgtgccacgcacagtgagggtctctacacacgccactgatccgtgccacgcaccaggaaggtctctacgcacaccacccacccgtgccacgtaccatgagggtctctacacatgacaccaccaaaccgtgccatgcaccaagaggatctctacacacaccaccaacccgtgactgtgaaagtctctacgcacaccaacaccaacctgtgccatgcactgtgagggttctctacgcacaccaccaagcggtgccacgcacacacacagctaaagtggagagcagagcctttgccacgcgcccgagttgttgaagggttcatacccagatctctcttttaaaacaggctccctggctggatgcggtggctcccacctgtaatcccagcactttgagaggccaaagcaggtggatcagtggaggtctggagttcgagaccagcctggccagcatggcgaaaccccatctctaccaaaacacaaaaattagccaggcctggtggcaggggcctgtaatcccagctactcaggaggctaaggcaggagaattgctgaaacccaggaggcagaggttgcagtgaggagagatcacactccagcctgggcgacagagcaagactctgtctcaaaaattaaatttaaaataaaataaaataaataaataataaaaaaataaaatgaaacaggctctgaggcagccctcccagcccttctcccaccctcctgcaggcgcggctggaacctgaaccctcgcacagatcagggaagggcagggccgccaggtggagctgtggcaaacgtgccctcccagctttccacatgctggggtttcataaaccaggagcgcctcagcgaaactccacggggaggacacagggctgccaacttcgacagccgaataagggcaatttaaaaaaacgtcctgccggcctgagtgcagcggtgtttacaactaactgccagttacggatctctttgttccttctccatgccaactgcttcacttgactagccttagaacaaaaaaacctcctacctcccacggtagagatttggggcttggctccccgaatcccccggcacctgcaggaggcaggggctgtaaccacccagcttctcgggggaagcctccagcaggagccacgagaaacctgcccgaggaggcacagcctcccactgccgggccagggctccagggctcacaccccagggcccacacttctttattaaaacagcttcattaagatgtgatcccctcaccacaacattcccccatgtaaagtgtacgatgcaatgatatttagtgtattcagttttgcgaccctcaccacaatcaactttacaacaactccaaaaagcccgcgcgcccacggcagtcaccgcgcattcccccggccgcgcccacggcagtcaccgcgcattccgccctccgcgcccacggcagtcaccgcgcattcccccctccgcgcccacggcagtcaccgcgcattcccccctccgcgcccacggcagtcaccgcgcattccgcattcccccctccgcgcccacggcagtcaccgcgcattccgccctccgcgcccacggcagtcaccgcgcattcccccttccgcgcccacggcagtcaccgcgcattcccccgccgcgccctgcagcctctgaactcctttccgtccctctggacttgctgccgtgtgctctgcacaggagagggacagcatctgttcctgcgtgtctgactcttccacacagcatggtgctgcggcgtgccagcgtgtcgctcctctctcgggctgaaccccactccactgtacggcggccacagtggtccatgcacccacccatcgctggaggacaactgtgagctgcttccacagcgggcattgtgtatactccagcttcaacgccgcgtccatccatttatttctgtggacgttcgcgttcatctctctgggaaggagaagcctgcgcaggccccagcccgcccgcgagtcttcaattctgtgtcttatcagagttgcctactgaggtggaggcgggcacaaccctcgaccaaccattagcaaagcccatgctccggccgtctggccccagttcctggtgtgacctcacccccaggtgggtaggactcctggtgagacacagcggcgccaccccacctcgttccccaacaacctcaacaccggaagagaaaacccaggcgaggcccccttgggctgaatgcactcggctctgaggaaacctccggcatccagcacctcattccaggccggggtctgcagaccagcacgtgggaacggcggcatccagcacctcattccaggcggaagtctgcagaccagcacgcggaacagtggggcttccacctgagcaccacacacctccttggcacaacccctctgaaccgattttcccgagtccctccagtgacaagaagctcaccactatccaggtacagaacggagccagccccactgcagggtgctgtcaacctgccctcacgaagggcctgagagtctgaggagaactcgggacgtgcctgtttaaataaattcatgtgcacagatatgccatgtgggtcactgggcagcccctggccaccccaccccacggttccaggcactgctctaaacggctgacgaactgtgagtagattggggtccatgatagccctctgggtaggtctgactgctgtccccattatgcagatgaggaaacagaggcccaaggtctctccgtggggaaggggagaagggaaaggctggaggagtacagaaacagttcacacacagaccatcaggccccaagtctatgcccagtaccacccaccactacgctcgcctcagaaactgtgttcaaatcccacgtgggaacatgaaggccgcgctctccagggtcctcatttactgagcacctgcgaggaccagcagacatggggtcaccagaagacataagggtcactgggagaaacgagggtcaccgggagacacggggtcaccgggagacacggggtcactgtgagacaatggggtcactgggagaaacgagtcaccaggagacacggggtcacagggagggacaagggtcaccaggagaaagagggtcaccaggagggccgaggtcctgcccccaaggctcacagacagcaggaaggaagcacacggggaggggggcctaggggcagaaaagggaggggggtctagggggagaaagtgacgggcagctctgttggggaggctggggtgggccctcagaaagaaggcaccacaggagcattccctggatgggcagcgtggaggggaggggacaggcagcagcttgaaggccgggcatgctgggggctgcgggagaggccgctcgaaggccgggcatgctgggggctgcggaagagagagcttgaaggccgggcatgctgggggctgcgggaggggctgcaggtgtgtggggcagtacctgccgggaggactgcgagtcacctgaagcgcaggggacccttagaggtgggcactgttctgacgcttgtcttatggatgtggaacatgaggccggcagggcgagaccctcgggtcccctgcaacacgtgaagggcagcactggcggcagcagccaggagcagtgtctgtgccaggcacagagccacagagactcccaggagactctctcagctccagaagcgggaggcactgaaggcagccctgccaggaggcgccgctccccgctctctccacccagcccctgcccagtgctccctccacctcgcccctgcccagcactccctggctccctccaccccgcccctgcccagaactcccagctcccaccacccagcccctgcccagagctccccggctccctccaccccgcccctgcccagcactccctggctccctccacccaacccctgcccagagctccccagctccctccaccctgcccctgcccagagctctcctccagtcctcccagctgcctcctctggactccaggtgagggccacctcctcagggtccccacttgctccacctgcctgcctttctcttcctaacgcctgctactctgccactctccgtgtctctgcttagctggcctgtcctcccggcaccctgtcatgtcagggcccgctctgacacccatgtggtccctagcacccagggcagcgccaggcacagctgggtgagcacacaaacaggtaggtctggacaaagcacaggcttaagaccagacacagcaaatcccaacactcagcccctcgccggacctgtctcaggaagaggtgagacccacgcggaaggacaggcagacctcccctcggacagacccccgtgggctctgggtgcctcggatggaagagttcaggctaaactgccatgaacatgcttgcagcccgaccaggctagctctacctctccagaggctaccgacaggaaagcccaaatctcaggaaatgcttcttgcagagacagcctccatcacagtgaggttccgaatggggaaaccgggaggaactcaagagacccacgccggggaggtgggtggagtcacccctcctccacgggagcaagggagccggccaaggaatgacggctggcacccctcccacgcccaacatcaagagtgagagtgatctcaacgtttttcttatgttcattttcctaatattttaataacaggtaattacgtctgtattaagggaaaaagcctaaaggggtgtcttggacagcggctggggctacgtatcggaactggtagatggctgggtgctgggggccagcagtgaaggcgacggcacagaacaggccaccccagtgcagccccaaaggcacgggggcagcagcagatgcgagaagggtgctctagcctcccctttcttcctgcaagcagatgaaaccccacgtgaaacacgccctcctcgtagaggaagaggacgtgctcatcaccagcaccgggagctgaggctgagagacagctgcacacaccaacccttatctccctcagcctccccaaggattttagttactttttcacagttgctattcttgggcatagaagccctcaggtctaactgcttcaggaggccttcactttctgaagtctcccatgtacctgtaaaaataacatttgtggccgtgcgcagcggctcacacctgtaatcccagcacactgggaggccgaggcgggtggatcacgagatcgagaccatcctggctaacacagtgaaaccccatctctactaaaaatacaaaaattagccgggagtggtggcgggcgcctgtagtcccagctactcgggaggctgaggcaggagaatggcgtgaacccgggaggcggagcttgcagtgagccgagatcacgccactgcactccagcctgggcgacaaagtgagactccgtctcaaaaaaataaaataacattcgtaagcttttctcctgttattctatgtcaacctaattctcagactctgccagagacccaaggagggaagccactgcacgcagcctaatgttcaggaattacatagtggtgatgattacacaactttgtgaatatattaaaaaccagtgaattgtacattttaaaaaagcaaatgttggccgggcacggtggctcacgcctgtaatcccaacactttgggaggccaaggcaggcggatcacgaggtcagaaattcaagaccagcccggccaatatggtgaaatcttgtctctactaataatacaaaacttagccaggcatggtggctcgtgcctgtagtcccagctactggggacgctgaggcaggagaatcgcttgaaccccggaggcagaggttgcagtgagctgagatcacacgccactgcactccagcctgggcaacagagcgagactccgtctcaaaaaaaaaaaaagaaagaaaaagaaaaacgaaatgttgtaatacattaattgcacctctattagaaagtaaacaaacttttaaaaattgtacaggctttctaattacaacaccctagacattaaaaatgcgtaagactcagcactgtaggaaaggttaaaaaaaaaaaaagcacaggaaaaaaagggaagagagcagtttgcaacttggggctgaggaggtggtgggggctgctcctcacctcctcttcttggctgaaacctgtttgccaagtggtgataatgtacttccagtgaaactctatcacataactcaataaaagcagggacttcccagctcagagccttcccctggcctccacctccggccagcttcctgcagggtgaaggccttgaccaggctatggatgggggaggcgggagagtccaccctccacacccctcctctccaccgcacagcagcctgcccagaggccagcagagatcacctctcactcagcagggatctgccgcgagccaggaggcctgcactgcccagctaggcacaaggcatgattcctgctgtggttatagctgggtaggggggtagtgaggcagcctatagaggtggaggggctgaccccgggcggggagcgctgggcctcaaactgccccccagatactaataccttttacatgttttcaatagacagccatatacctacatgaaaagtagccttgatttcccctcttgttcctaaagcctaaaatgtttactatgtggcccactgcagagagtctgctgaccctgatgtaaataaaggaatgagggtgccggcgtttggggtgcacactttccaggccacagccaggccaaggaggcacagcagaggggctgagcacctggaatggcgccaggagggaggggcaggcagggacctggggcaaggcctgggcagctgggagggaggcccagcctggggctccgtgctcagcagctgctgccctggaattcctggtcacttcacctttgacccatattttgtaagtggggtccaagggcacaagggcttggtgctgggggctcctagcctgggcttgggggtctctgcacccacccgtgggtgaaatgccaaacacaaaacaccctggccgacccagagacctccaggaaaggaagatgcttttttcctgccttttagcataagggtccacaaattccatagccagaggggccgggggcagcagaggaggggtaaggggtgaggggccagagctcagggtctggtcgctcttctaagagggaggcgggaaggaactccgcaccgtggcgacctgggacagggcccacactgctctgcatcccaacttcctctccgagaagagggaggggccgacacctaccagggagatgtgaaacaaccagcctgggtgacagcactgtgcccctgtgagcaacgggcagccgcggtaccagtccttggcgtcatcaccggctctgccacccgcggaaatggctgagcctcagctgcctcctctgcaaagcagggacgggaagggcaggtgccttgctgagctgtgtggggactgagtggaggcttctgaggactcaccagggttaagacgggtgttcattcaatgctccccagttctcttcttctcccgtccctccaggcatgctctcagcccctgctgaagcctgtgtcctaatccatcaggccctacccccaggacctcatggcgggggcatgggaccctcacccgcagaggtgaacgatgggagaggcgggggcaccaggagctgcgggggcctgaggcagctcctgacccagctctcagggtccaggccagctccctaggagaaggccccccacttgctctcaagaaaaccctgggctattcaaggaatctaccagaaagctgggaattgcacatcttctgaaacgagggtcccggcctcccttaccagcctccgtttctcagtcggggtctcaggctctcccagcctctgcaggtgcttactcacctggctctgacctccgctgcagagaggaagcacctggagcacgggcaggggtgcgttcccctcgccccagcccttgagagatccaattagcacaaatgattgttattattgttgttattaagtcccgcccacccctctggaggcctgcctgccaattatcccctttcttctgctgccaatctcacctcctcctccccccgcactctcggaagcaactcctcctggccctccgtggccctccctgcccagaaacttctctggcacccacctgctttcttcctccccccagtctcttattccttcccctctacttgcagcctggagcagccacctcccttccttccccccaagtcatcctccaaccactgggctaacaccctctctgacttttcaccaaatcctgtggctccttctcagcctgactccacaacctctttggagccaccatgcaccccatgtggccctgcctttgtggggcgggggaggagctctggggtgcccagaccagccgttccccccaccccaccccctccagcacggagggctctggccctttcctccctcccaccctcactctcttctccccattccccttcccttggggctttcgctccctcccaccacgatcctggctcccaccctgcctcttggaagtgccctcctcacaccacacaccaactcatcttcctgaagtcactcagttcaaacaacccaattagaacccgggcaaaggatccgagaaagcattcctccaaagaaagacaaatatctgataggcacatgcaaggatgtcctcatgagccgtctgggagaggcagaccaaacccacagggaggcagcacctcacacccactgccagcctcagaaaacaagtgctggtgaggaccaggagaagtggggagacccccattgctggtgcgggcgccataggaaacacctggcagttagttcctcaaaaggttaagcccagaactcccataagaacccgcaattccactccttagtatagacccgagagaaaacatgcgtccgtccacgcaaaaatctgcacacgaatgttcacagaagcatcaggcataacagccgaaatgtagagacaacccaaatgtccatatggatgaactaactgtggtccatccatgaccgtaatggaacacgaccataaccaggtgtgaagttcagctgtgacagggatgaccctcgaacacggcacgcttggtaaaacaagcccgatgcagaacagcacgattctatttatgcgcctgcccacaagaggcacaccccgggaaagaaagcagatcagcacttcccaggaaccgggacgcagggaggcagggaggcagggagggagggactgctgaagatgcacggcgtttcttttgggatgaagaacaggttctaaaatcgactgtggtgatggctgcgtaaatcagtgaatacactaaaaaccttactgaactgtatattatttatttatttattgaaacagagtctcgctttctcgcccaggctggagggcaatcgcaccatctcggctcactgcaaccttcgcctcccgggttcaagggattctcctgcctctgcctcccgagtagctgggactacaagcgctgaactgtgtactttaaaagggcaaattgtacactatgggaatcatatcataataaaactgttctcaacaaaaagcaactcagttcatcacctccttgcccaaactgctgccactgcacgtgccggctgcccctcaatccaaaatccaagttcctccccaggcaccacagggttccatctggctccggcacctctgcaaaccccctcccttccagctggcccggatctcgctgtgcagtgcactgctcctgatgcaccgacaggctcagtcctggccaggcccggtctttcacccttaaggaccggccccactcctccacttgccccggccaggcctggtctttctctctgaggggccgggctcagtcctccacttgccccggccaggcctggtctctctctctgaggggccgggctcagtcctccacctgccctggccaggcctggtctctctgaggggccgggctcagtcctccacttgccccggccaggcctggtctttctctctgaggggccgggctcattcctccacctgccccggccaggcctggtctctctctctgaggggccgggctcagtcctccacctgcctggctcagtctcacctttcaagggtctactcaaatgtcagcttctccctgaggcccacaccccacctttcccatggcagggctgacttcctggctggtcagcaccttctgtcaccatgtcacgagcgtggtgatatcacttctattggtatttccttcctgggactctgcatctgctcctgggcacaatgctccctgagggcaggtgccaggggtgtccagcacctgctgccctggtacccatggctgcttccggaaccaacactgctgcccggccccgccgcagagccctctcctgctcaccttcccgctctgctcccagctcaagaagcccacagcgccacccctccactcccccaccagctctttcactgcccttttctgtggccacttcgctccctcactcctggcctgaaaacctcattcttgttccctcctgcacctccgcctggatctgcaggctaggtggggtgacatctacctggcatcttgcatggggccctcatttcctcagccccgggacatctctgtgacaccacggagatcccaggcctgccctccctgagggtggtggggaaagctctacacaccctttcctgttcattctacagtgactggtctgcgtagaccttccctctcgtctgagccggttttggcagatcacattctcctagagcacagcctgcacgtccctctggcggggttcaggacgcagagggaagccgttgtcccgtgctctggcccctctccctctctagaggccggccgcggca[137 bp omitted]gcctcccgagtagctgggactacaggcgcccaccaccacgcccggctaactttttgtattttcagtagagacggggattcaccatgttagccaggatggtcgctgctctattcttttccagccacttcacacctggactcgcgcagcagcctcccaaaggtttcccgcatgcctcccacccgcaccacccacaccctccccgtcagagccgtcttcctcgggggcatcagcacagcgacggcagagacagctcacggccccagccaccacactcaactactttccgagagggcgagagagagggacttcatctactgtcagggtgcagtgtgttgtggagacagcggggcacagcccgcaggacttggtgcctgcagatcttcagatccttatgcgaaggcttccgggtcttagggcagccgagtaactgagaattgtttaaaagacaaaacagtcttgaggccaaaagccccacacacctacaaagtacactatggactctgggtgatcatcaggtgtccgtgtaggttcatacattgtcacaaaacgcgctgccctggagtgggagttgacagtgcgggggctgtgtcgggggagggtgcaggcggatatgggaaatctgtgcatcttcctctcaattttgttgcgaacctaaaactgctctaaaaaaaaataaagcccctggctgggcgcggtggctcacacctgtaatcccagcactctgggaggccgaggtgggcggatcacagggtcaggagatcgagaccatcctggctaacacggtgaaaccccatctctactaaaaaatacaaaaaattagccaggcatggtggcgggcgcctgtagtcccagctaccggggaggctgaggcaggagaatggcataaacccaggaggcggagcttgcagtgagccaagatcacgccactgcactccagcctgggcgacggagtgagattctgtctcaaaataaataaataaataaataaagcccctggtcaccactcaggtggctgaggaggcaggatcaattaagcccaggagtttgagaccagcctgggcaacacagcaaaatcctatctcttaaaatatatacatatatgaaataaaacactaaaaataaagcctttatattaaaaaaaaagacacacacacacacaaaaccacacctgcggaccaccttacattctgtgacccctctgctgggccaacagggcaggctggccattttccagatggtgtggattctcccccggggcctttgcacagtcccttcctcccacctcacctgccctctcagtatacatctgcttagcccatctgccacggctcagcatcaacagcacctcccccaggaagctttcccagactgctcccttccctcagctctatcctctcttatccagcgacaaaagatcacactcatcaagcacggattaaatcccaggtcctgggtgcagggtgccctaagcacataagctctgatcctgggccccacaatcagtgggagacagtgcgaggccatgaggccagcacagggacaagaggacagccgttctgggcagggcagggtgggatctggccccccaggaaccagccacatgacctgggcaaggtgcttgggctacccgtccctcctgattaaatgagatgtgtgtcaagtgctcacccaaaagccgtggagatgcccagtaaacacagcctatcactgtggtccttgttgtatagacaaggaaactgaggcttccacaagcagagtggctagtacagtatcacagagccacagcgaggctttcaaaagcggagtggctagtacaatctcacagagccacagcgaggcttccacaagcagagtggctagtacaacctcacagagccacagcgaggcttccacaagcggagtggctagtacaacctcacagagccacagcgaggcttccacaagcggagtggctagtacaatctcacacagccacagcgaggcttccacaagcggagtggctagtacaatctcacacagccacagcgaggcttccactagcggagtggctggagcaatgtcacagagccacaacgtaggaggctggagccacacctgagtcggccagctgccaaagacagcttgcttccttctaactcttggacaacggcatttgtcccctttaacgtccaccattgaggatggtcctgtgtcccgcagggggatctgtgtcttactccgtgtcttattcacctctgcgacacctactataggtccccatcagtcccacagtgcatccagcagactgtgcacttgagggcggggctatttccagcaaagaccctgcacacagcagcctcaggaatccatggctctgactggctggaccctgggctgaggcaaggaccacttctgatgcatctctgggtcccaacactatccactgcaaggcctcgaaacaggggggccagatgggacccccatttagcacaagagagacgtccacactctgtgagcccaaagggagaaggctcaggccacggcagagacggaaccaggaaaacgtcacgaaaaacagcctcaagttgccaggtcccttgcaggaacagacaggcctggggccgccccacctgggctcagagcttgggctggtttctctgcagctgtaaggtgacagctctgggctcctgggacagggccactgacactggaggtgtgactgctcgaactccacacctgccttgctctccctgatgctgggtgagtgaggcctccttgggggttgcatggatctcagcactcaacttccgagccacttgtgcttctcccactatgctggggttcccctgaaccagccagcagccctgcgtgtaggagtcctcgtggacagtacaccccactaggcagggagtccagcgtctccaagccaatgactaacacctagaggacttcggaacagcctttgtccccctagaccccaacctgggggcggaagggggcggttgtgatggtcaagggtctgggctctggaatcgcagtagacacaggttctgaagctgctgggggccttgggctaacaagtgccatccagagcctccatcccatacccctaaaatggaggtgaccacctccatcccagagccttgagaatttaggacagtgaggaccaggcactgggccaggttcctgcaaagtgtgcaccagcaagtgttgtcgaatctgcagtttctcacaccacagaggccccagcacctggcacagtcctcactaggctggaggcctcaggatgcaccagaggacacacgaacgaggtttggaaaggcctgtgaaacatgtctgaggatgggtgtcctgagagctgtgtatgcctagtaacaaaagacctcccagggcagccaggcagttgctggtggccttgagctgtgacccctgccattccctgcccagagcccactgtcatcctcccttaagtaccaggttcctggtagccaatccttcctctctatctttcaagacacaatacctcccctgcaccacacacccctccctcaaggtcagagctcccgggagcactctggcaaatctccccacccctctgcccagtgtgaatgggtctcagctgctctgggacagggactgtatgattcctgccaggctgcccagcacggagcaccactctaccttgtgcttgcacagaagggccttgagatccctctcttcacccaggctgggccaggcacctcatctgggccctcacaggacagtgctgtgccaagaccatgtgtgacctcatgcccagcacagggcctggcctgtgcagccgcctggatggattacatttactcagggaattgtgaacttgctctcgtttttagacaactgaagggaaattgaacctgggaaaagggaagtgacatgtccaaggtcacagaagtggaagagacagtgccaaggccaaggcccaggaaagggcctggctccagagccctttccatttactttacacccatctgttgaggtctgctctggctctaaaatgaaagcattaagagccttcccgctgaggtcaatactattattaccactcccactctgtcctggtggaaagtaaggcactgaagttactcgtctaaggccacgaaggtgagtggtggggctgggacttgaacccaggcctgcccagtcccagagctcttggggaatacaacccagtgcctgcacacactctggcagtgcaccagggaggggccaggccgggtgcccggatggatggataagacatgagataagcaagcaggaatctgatctggatgttctctgaggccgtgcgtggccggaggaccacagggactgcgcagaggcaggcaggtgaatgtcagcagcgtttagccaaagaggcttacggtcttcagaggagctaagccaggatcaacgcaactgtgcttcccggcgctggggtcaatcggatccccagatgggttctaagcactgcgcaacatgggacctgggagcaggacaccgcaaagagcagaccaagccattccttccctaaagccctgaccatcccccggactgggctgggtcaaaatgccttccctggctcccacagcccccagacctctccatcaggggtctggtcaccttggatggcgactctgtcgcccgggtctcagtctctgccttccacccagactccaagcccttgttcatctccctgctccctgtctctagtgcccggcacagggcctggcactggaaaaacttctgcctccactcactcctgccttctgtgtctgtgggtcacttttctgtgcgactctgcaggtcccagagcactcatccacatgaattggggtcagctccctggactgggggtcggggtggggtgtcaggagggcggggctccactctgatccactcggcacaggggagggaggcctcaggagtcgccacccgatccagtccccgccttcgccctgccccgtgggccacgcggtggctgaccttggcccagtcacttcccccgctggggacgcgcttcctccccgcctgccgagcaaggacgaatgaatgggcctcctgccggccagaatccccgtaattacccgcctgatcaaaggccacgcgcagcccgcccggggcagcaacgggacccgggctgactcgaaaaggggaaggaagggctgggggggccgagggctgagaccgtgccctcggggccgcggtatccggccaggccagcccaaccgcgcggccccttcccccacctgggcctcaacttccccccgaagtcgccaccacttccggccacgaccggcggagttggaacttcggggggacggacagcggccccacccccgacggcccgcagcagagggacccccaccgaggcccccgctcctgcccccgccacgcgcacgcgcgcgccctggacccggacccgcgcacgcgcaccccccctccagccccgctcgccgcccgcgggccgcccgggcgcgcgtcccctcccacagctcttcggcgcgcacgcgcactccccccgcccgcgtcaccccggccgcgcgcccactcacgcccccccagcagcgcgcacgcgcgcccgccgcccagtcgcgctcgccctccagtctccccacccacccccagcccaagcccagcttcccgaagcgcgcgcccacctggcccccagcgcacggcccccgcccccacccctcacctccttggtcccggggccgccgcgccgcactcctcctcctctctcctgcctcgcggatggtggcagcggcggcagcggcgactcagaccctggggtcagggggacgggcgcccaggccggaagtgaccttcccggccgcttccgcccgcgccgctcccccccttctccctactccctgccccccgggccgccaccctgtcctcgccgctctaggaaggcgagcccgctatcccggccaccgcccccagctctgtggtgcccggcgggcgcctgagggagccacttccggaagtgtctaggacgcaggtcctccgtccatgctctatggcgccccgcgccgaggggcttcggccccgcccccttcccggacaggaggtgcgggctgggcccgttaggcggagacttccgggtgtctagggcggtgcccccccgacaacccgggctcctcgcgcctgcgcggccgggtccccgggcccgccgtgaggagagtgaagtggtggagagggacgctcgtgccaccccgggtcctcctaccgtctctatcatggtaaccccttctctgccgctgcacctcccagtggcccgagtccaggtgccttagttactggacagagaccccgggttccttagttactggacagagagtgctgcgcttcaggtgccatggcctcagtttcctcctttctgaagtgatgaaaatacattgtgcgcctccaagtgcttcacacgcactaggtcctagtcctaactagggcctcatggtaggtcctatccctatgttgcaggtgaggagtcaaatcacctaccaaaagtcacacacccggaatgccagagcctcggcccgaacccatggagtttggctctaaattcgtgtatttaacccttgactgtacacactgcctcgtgtcatagccctgagaatccactacttcccccgcgttaggtaggcacctagtaaggacgcactgggtgttagctgttactgttggtattcttgcaaaaaacacatattttaaaataattgtccaaaccatagtgtccttgtaggctggtccttctggtccttcctctgttctgtacttggctgactctcacctaagtggcagatgacttatcgcttataattgttatcatcctcactggtagtcagaaaagataagaagctataattcactggtggaataacacctttctcagcctcaatttctcatctgtggaatgggaaaaaataagataacctgcaaggtaatatgtgtaagagctgcttagttcaatacctggcccatagtaagttcacaaaaatgatggtggttattattacctattagcagtgttacatataagtctattgttgtggccactgtataccctcaaagctcagtgagcatcaatcataagatgtatattattgatttaataacatctttccatggggtggggtgaacagtgctgtgttaactgtgtgtgtcaataggaggatatctgtgtccctccttcagaaatatcacaaaggtaaatttttaaatatatcttagaacagaaggaagtgtggccgggtgcagtggctgacacctgtaaatctcaacactttgggaggcagaggcagacgtcaggaggtcaggaattcgagactaccctggccaacatagtgaaaccccatatctattaaaaatacaaaaattagctgggcgtggtggcggacacctgtaatcccagctactcgggaggctgaggcaggagaatggcttgaacctgggaggcagaggttgcagtgagctgagatcgcaccactgcactcttgcctgggcgatggaatgggactccgtctcaaaaaaaaaaaaaaaaaaaagagagtgaagtgctatcataacagcaatagaaacaaattattagggtacaaactctacacgaggaaacctgtttataagaaaagtcatgtgcttgtgctcctctgaatcagatcattcagtgggtgtcctgcagtgacctggttgttgggagggacagcctcctccctctccagcccattccccttcttcgctggtcaaattgacaacggcaagatcgagaacagctcattggcacaccagatggaagccaacactgaggatggaggagaaacaagacacagggagccagctagacactggatggcttcgtgaaagaggctccgtgccagctgagattttatgtgagagaaatcactttctaactcactgaaaccattggtaattctgagtctctcccttaaggcaacccaaccaataccaggatgtttcccaaacatgggatgggttgcagccgacatggcttaattgacaattaacatctgttcttcccttccgcagtacaaaatcactcttgggatgctgcttcccatcgatggattctgttttccactcctcttggcatctaagtgtggccttgtgattggttctcaccaatgggatgggatggaagcgatacaggcctcttccgagccaatgctcttaagaaacatgtatgttggccaggcacggtggctcacgcctataatcacagcactttgggaggccgagacgggaggatcagctgagtccaggagttcgagaccagcctggccaacatggcgaaactccatctctactaaaagtacaaaaattagccaggcgtggtgggcgcttataatcccagctactccggaggctgaggcaggagaattgcttgaacctaggaggcaaaggttgcagtgagccgagatcccaccactgcacttcagtatgggcaaaagagtgagactccatctcaaaaaaaaaaaagaaacatctgcctgcttcctgctctttcaaggccctaaagaaagaggggagccccaagaaacctgggtccctgaatgaccaccttgtggaaatacatcctgtcacctaacatctatcctagattgctacatgatcaagaaatacacatctaacttgtacacccaatgctcatagcagcattattcacaatagccaagaggtggaagcaacccagtgtccattgacagatgagcgaataaacaaaatgtggcacataaatgcaatggaatagaccagacgcggtggctcacatctgtaatcccagcactttgggaggccaaggcgggcgaatcacctgaggtcaagagtttgaaaccagcctggccaacatagtgaaaccctgtctctactaaaaatacaaaaaattagccaggcgtggtggcgggcgcctgtagtcccagctacttgggaggctgaggcaggagaatcacttgaacccagaggcgcaggctgcattgagccaagatcatgccactgcactgcagcctggtaaacagagccagactccgtctcaaaaaataaaaataaataaataaatacaatggaatattttttagccttaaaaagagagaaaattctgacacaggctacaacatggatgaaccttgaggacattatgctaagagaagcaagccagtcacacaagaacacatactttatgattccacttatatgagggacctagagaagtcaaattcatagagacaggaagtagaatggggggtgccaggggctggggggaggggaatggggtgttagtgtttattggagacagagtttcggttttgcaagatgaaaagagttctggaaatggatgggggtgatgggtgcacaagacgtcaataggtttaacactactgaactgcacagttacaaatagttaagacgtagccaggcgaggtagctcatgcctgtaatccctgcactttgggaggccaaggcctcctggctgaggtcagtaggtcaagaccagtctggccaacatggtgaaaccctgtttctactaaaaatacaaaaattagccgggcgtggtggtgcatgcctgtaatcccagctactcgggaggctgaggcaggagaatcgcttgaactcggaacgcagagtttgcagtgagccgagatcaggccactgcactccagcctgggcaacaagagtgaaactccgtccctcccagacacacacaaaaatagttaagacgttaaattttatgttatatatagctacaatttgaaatgtgtttagaggaaaaagtacccttctaacgtgatgtgccattacaatgtgtgcgtttctttattacagcagcttcacccttccctaatacagagttttcagatgccaggcagtaaaaatggtaaagctccctttcaggggtgcatcagcatctagatggaatttacagcctcgagtctgaataaaattggggttagggggcaatggtgagtacggagagaattgcaaatggctataacagcatcatttcacccaagttggcccatcagtggctttctctggatccttctctttggagagtccctctctggcatagatgccgggatgtgagaggctggaaagctcaaggcagtcttgcttcccaccgtgtggaggaagccagtctgcaggaggagaaaatgaagcctcacagagaggtgagagttggagggagacaatgtcccagctgagttgagtgcctaggccataggttcaggtgcttctactctgcctaaccttcctgagggctggacgttccactcttccttcccttgagtgaatgagtctagacttcttccaggaaagccctgttttgggttcctgccacttgtaaccaaaagagccccaagtctccccccagcactctgggcatcgcaagcctccatctacgtggaatgagtggtggacgaccggaatagccacacatctctgtagtgatatggaaggtcagaggtccccagtgcagaggcacgggcggcagctcctgctggggagccctttataacctcctcacggttttctcctgagggtgtggccctaggccgagtgacaggaacagctgcagctggcagattggagagggagagtttgcagctgttgaagtacaattgcttcgaagtccttgatacacagagaaacgcacacaatcacacttttcaaatgatcctccttacagtgataattaacaaacacttcttgagttttcatcatgtaccggacacactcctgggtgctttgcttaggtgaacatgctcaatcttcatctctactcccagacacagttaggccccggcaggcagcattgacagcacccacagacccatgagaaatgtagaatcccaggccctactccaaacctacagagtcagaatctgcattttaacccaatcctcaagggattcttagccatgggaaagtctgagaagtattgatgccaggcagactccaggatgcccagttaaatgtgaactccaaatcaaagatgagtaattttttagtgtaaaaatttcccaataccgtctgggcacggtggcttattcccgtaatcccagcactttgggagtccgaggtgggcagatcacctgaggtcaggagttcgagactagcctggccaacacagtgaaaccctgtctctcctaaaaatacaaaaattagctacgtgtgatggcccaggcctgtaatcccagctactcgggaggctgaggcaggagaattgcttgaacccaggaggaggaggttgcaatgagccgagatctgcactccagcctgggatacagagcaagtctctgtctcaaaaaaataattaaaaaaaaaaaagtcccagtacttatccaatctatatatataggatgtatatatacatccgttgtttatttgaaataaatgcaactgaacattgcattttaaatgcatcctgcattttaatttgctaaatatggcaaacctatgtggagaaccctgtggccgcctcctataacgttcttcacccatcttcctagatttgcacatctcctccgtgtgccagctgctgcagctggggcgcagagggaggggctttgaggaagcagagcgaccctgcctcagaccaaccattccggcctgtgccccatgcacaccgatgggacagagacgggctgagtggggctctggggaattctggatggcaggatgtgggacgtgatgattgcagcggtggcacgtttcaggttgcatgagacaaatgcagctcaaacggattggaggttaaaaaaagagaaagaaaactttattggcttgggtaactgaaaagaaacagcagcaataaacaccagaagctgaagctggacaccttggggcgtggttggttggatccgggagcacaggggccccaggcctggcccgctgtctgggcttcgcggacctctttggtttccatccctccactgtggggaataaaggccactgcaaggccaaggccaccctcacttcctcaccctgctattatttccctgaatctgattggctcacctgaaccaatcacaggggccgggcaggggtgggagttctgattggccagtccagagtcacatgtccactcctggagcagggcggaaccagctctcataaagcacgtggaaggagaggacggaaggggtgctctattctcccttcaggacagactgggtacagtgactgcagacaagggtgggtgcccagagccaaaataagaggtctggaggaagggtccaggtagccacaggcattccctcatgctgtgttcaccactgtccagagaataagataacccaaatttctccagcttcaattaccatatcgcatttaaccctcacatgaatctcatagggtaggtgctggaaatggaagatagacacatatgtaaatgtgtgtacatgcttccaagaggatatacgaatgcataaatatgcatttcttctctaagaatgaaatgttggctgggcgtggtggctcacatctgtaatcccagcactttgggaggccaaggcaggaggatcacttgaggccatgagttggagaccagcctaggcaacatagcaagactccatctctacaaaaaaaaattaggtgtggtggcgcaagcctgaggtcccagctattcaggaggctgagacaggaggattgcttgagcccaggaggttgaggctgcagtgagccatggtggtgccactgcactccagccttggtgacagagcaagaccctgtttcaaaaataataatgataataatcatcaaatgtttatctcactgaaatgcatttccaaatacatttattaaagaataaatcctcaacttaaatggaattgtccatccattgcactttgtcctgtaaaactttttttttttttttgagaccgagttttactctttcccccaggttggagggcagtggtgtgatctccgctcaccgcaacgtccccctcccagtttcaagtgattctcccgcctcagccccccgagtagctgggattacaggagtccgccaccacacccagctaatttttgtatttttagtagagactgggtttcaacatgttggccaggctggcctcgaactcctgacctcatgatccacctgcctcagcctcccaaagtgctgggattacaggtgtgagccactgcactcagcctgtcctctaaaactcgtgatgccaaggcgaaaaacattgaccaatccaaacacccaaagacctccttaactataaagcttattttcatttaatgagaaaaatatattatgaccctttaggcatcagttcatttcaagcgaatccttctgtggtaaagacaaaatgagatgaaaaattaacgagagctcttaaataaatcgtaaaacctgttaaactttctctccaggtggtgggttgttcccagtgctataaaagttcagtataaattccaagcggttttgaggaacacttccacctggtttcttcttgttgctacaggagtttatttatccgggacagtttttcctgacattattgcacacagtaaaatgtctgaggctgctggttattttattttattttattttattttattttattttattttattttattttattttatttttcgagatggagtctcgctctgtcacccaggctggagtgcagtggcgcgttctcggctcactgcaagctccgcctcccgggttcacaccattctcctgcctcagcctcctgagtagctgggactgcaggcgcccgccac[184 bp omitted]aaggggctgcttggagaagtggcaccagtcttcgtgaaggtcagacagcctgggccataattctcagccccgtctcctgaaggctgtgcagtgtggtgaggagagagagacaggctttggacccctccgatcctctgtggaatggccagaaatagcacaggaggtcctcaatgtcccagagtaactggcactgggaaaagagcacttaatacagcagcccgtattttatatttatgcaagacagttatttccatgtttgtttgggattctcgacaaatgaaacaacaacaaaaaaacacatcattttaagaaaatacaggctgagccgggtgcagtggctcatgcctgtaatcccagcactttgggaagccaaggtgggtggatcacgaggtcaggagttcaagactagcctggccaagatggtgaaaccccatctctactaaaaatacaaaaaaattagccgggtgtggtggcgagcacctgttatcccagctactcgggaggctggcgcagagaattgcttgaacccaggaggtggaggttgcagtgagctgagactgcgccactgcactccagcctgggcaacagagtgagactccatctcaaaaaacaaaacaaaacaaaaaacaaaatgaaacaaaaaaaaaaacagaaaacaatgtatcaacaaagatatgtttaaataaaaacatacgtaaaataaggcttgtgttgacaaacatgtggccagaggctcacaggaagccaacgcagtgtttccctaggagcgttgattcagtgttccctgatgagatgttcatggtggcttgacagaattaccaggaatgctgagaatcgactcctggttgattttgttgtatatttaacaaaatgtaagcaacaactgcagtgatgaatgtatgccccgattcttagaaaaatcaaaacatgaatgaggtgcggatttgtacagtttccccgatgtgactttcacagcacagttataaagaggggacatttgcactttgtgggtctcaccagtggatgtttttactgctgtgataacttcattcctggcagcaatcagatgatgactttttgttttttgtttttgtttttgtttttgttttgagatggagtcccgctctgtcgcccaggctggaatgcagtggtgcgatcttggctcactgcaacctccgcctccagtgttcaagcaattctcctgcctcagcctcctgagtagctgggattacacgtgtgcaccaccacacctggctaatttttgtatttttagtggagacggggtttcaccatgttggccaggctggcctcgaactcctgacctcaggtgatctgcctgccttggcctcccaaagtgctgggattacaggcatgggccatcacgcctggccggaagatgactctttggataatgtaccctatattgtctgaccctgttagggcaaacacctcacaggtgtggccagtgctaaatgagatgcatgaagccgctaaacccagtgctcagacacataagaagtgctcacaaccgtgagtagttattaccattatggcgattgtctaaagtggaatggagaagtgtctcagtctgggttcgagagaggaaacaggtaaatagaccccacgccaggtattttatctaccaaagggtttaatgtagggaattaaatgttcacaaaattattgaatgggctgagcctcctgcgataactcagagaaccacacggaactgtcccagcaaggagccaccgcctttgaggactcatctgtagctctgagttccagaacatatccccagagctgtgatccaggggccaaaagctgccacctgaggtccgggaagtcagagaatggccctgactgcctgccgtggagacacctcatattccactgttatacttgccaggaggaacagtgcaagaggggcaagagaagcgggggaatgaaaatgggccctgctggcag[154 bp omitted]taataaaatacaaaaattagccaggcgtggtggcgggcgcctgtaatcccagctactcaggaggctgaggcaggagaatcgcttgagcctgggaggtggaggttgcagtgagccaagatggggccattgcactccagcctgagtgacagagcgagactcgttctcaaaaaaaaaaaaaattgtgttctgtacaaagagtcacaccacaacagcaaaaaattcaacaccttccttcctctgacaacatcacattctttactgctacttccttaccattgaaaacgcaaccctgcgctatcttcctgccttcagggcaaaaattaaagagaagagctgggcatggtcgctcacgcctgtaatcccagccacttgggaggctgaagcaggaggatcacttgaggccaggagttcaagatcagcttgggcaacataacaagaccctatctctgtaattagaaaaaaaattgaagccgggtgcggtggctcacacctgtaatcccagcacttatgggaggccaaggcgggtggatcacaagaggccaggagttcgagactagcttggccaacattgcgaaatcctgtctctactaaacatacaaaaattagctgggcatggtggcctgtgtctataattccagctactcaggaggc[137 bp omitted]tgcattgcccggcttcttaagccttcattagaactgctctccacttcccccaacccccggcagagccctctagcacaagccctaacgctctgaaaggcctcttctgactctttgtacagggatcccctggaatgcgtcctcccttgctgaaccaagataaataaacctcactgccagtggttcttttggcccttgatcggctttccgcatcttactcgagtgcacttaattagcaaagcccagttcagcccagaactctagctctccagaggtctgggaaatgcagcttcaatctccaaccggagagatttctctccagagagtaaagggctggaagtgggggcgagacggaagccacagtatcaacctctgagaagccgcgttcattcctgccagacattgcgagatacagttgggaagaatttccaaggaattcttctctgccttggcagtgagggtaaggtgagcttgactcgctcctcctgtaggccctgctcactctctgaacatctaaggaagaggatatatctggccggtggaaaacctgctgccggagctgggtgg[133 bp omitted]cctccacctcttaggttcaagcaattcttctgcctcagcctcccaagtagctgggattacaggcatgggccaccatgcccggcttatttttgtatttttagtagagatgtggtttcaccatgttggccagactggtctcaaactcctgacctcaggtgatccacccacctcggcctcccaaagtgttgggattacaggcgcacaccaccatgcccggctaatttttgtatttttagtagagacttggtttcaccatgttggctagactggtctcaaactcctgacctcaggtgatccacccacctcagcctcccaaagtgctgggatcacaggcatgagccaccgcacctggctagaatgcccttcttgagcctcagtttcctcatctgtgagagagactcaggacacctgctgctggccttaaaacccgggtctcttgctgtgtcacctgggaaagtacacctgctccactgagcctcgattatcccaaccgtaaaatggggtgattctcaggccgggcgcgatggctcacgcctgtaatcccagcacttcgggaggc[272 bp omitted]tgctgcctcgccgggggagcatgagggggaagtcagataatgggcaatgtgatccatcattaagcaattcgttcattaatttcattatcctttctcaaacgtttcctgttgcctgggaagccaaagatgactcaggttcagatccagccccctgggagcctgcactgctagacacagactgacatccatacgccatccccccttctgctggttcttcccctttctgctggttctccccctcacacgctcactcagctcactcatgcgtccatcatccactcacccataaacccaacccgagcctccagagatgaaccaaaccccatccctgccctgggggatcttagtgcttcaaagcaccatacaaagagaaaaaccttaattattatttggggtaataattatagcagagctacaaaggagccgagaagctagaaggtatgagctaaatttgctgtcaaaggaattctcgccctcaggcctgggaagcagggtaagaaccacttgccttcactcttatttactcattcacaggcaggccccaagccaggagctgggtacagcaggcaaggagggttggtctctgttgctgagtcgctcagcatgaggtgggcggagcagtcacccaaaaatagtatatgaaatggagaaagagggggctctgcggaagctccagtgaggcacttggtccagacttacaggtgtgggggtggtctgggaaggcttcctggaggaggggacgtctgatcacagagtattatatgatgttaccagatgaagaagtggaggaaggacatttccaggaagtcgttccttcatttcattcctcaccaagatttatggcccacttaccatacattaggacctgtcctaaacgctggtgtgccaacattgcacagatcgtcaaggtgatatttatgtaaacaggacccaggacaaaattaaaatgcagagccctgtgtttaaaaaaaaaaaaagtattaagaatttcaagctgggtgtggtagctgtaatcccagctactcaggaggctgacgcaggaggatctcgtgaggccaggagtttgtgag[212 bp omitted]gaggcaggagaatggcatgaacccaggaggtggagcttgctgtgagccgagatcgcgccactgcactccagcctgggtgacagggcgagactctgtctcaaaaaaaagaaaaaaatgtcaagatagccacagctgggcattcaaccaagtgcagggcagcctgcaaccacacaggttgcatcccatgaagctggccccggatatgtgtgacttgctgtcacttttggcttcaacaacagacaacttgactcaaaatggcttgaggggacttactacttcatgccaagagaagcctggaggtagggcaggtccagccacggttggttaaaattcagctgccaaaccatgccatgaaggatccaggttcctccgtctcacctcccttccatcctaagtgaggagctcccactaccagccctcatggtacccaggtggctgccacagcttgaagtgtcacctgcagacagggcagggctccagggcaactgtttcttcctgcttatcagttgcttaagagttgggaaaacctttcccagcagtgccccagcaaatctgccttcaggtttcattagccagaatagtgtcacatatgtgagcgtcaaccaattgctggcaaggagaaggggcacagcaaaattggcttacaccaataaggacctgctcctggtcaggcagggtggctcacactggtaatcccagcacttcgggaggctg[135 bp omitted]ctgaggcaggagaatcgcttcaacccaggagacagaggttgcagtgagccaagatctcaccactgcactccagcctgggtgacagagcgagattccgtctcaaaaaaaaaaaaaaaaaaaagctaaaaaaaaaggacccgctccttattgggcccttgggcccttattaaccacgctcacccccaatcccaactctctgagtgtgttatgacctccattcaagtgaagacgccgatgagctgagatccccaggctctctcggctggggcatgttgggtgggtttggagccctgccctcacccactgtgctaggccctcaactctggctggacactgattctgtgtactctgtccaccctcggatcctttgtgcccatacaacatttcatctgtctcattataggtgtccagtttgtatgaagtgaacaaatgctgagcagacaatagccagtagtgaaacaagctgtttttgttgcacggatgtggggagggagggaagagtcaactttgcatttgagctgggcttgcttttatcagcgactccactggagttaagtaagaatagcaagtgtttattgaactcgtactccctgccaggtagccttccgagtgctttgcgtgtattaactcatgaatcctcccaagcaccctgtgaagcggcgactattctagagtgcaggtagaaggtaccgatgcataggagtgcgcctttgcatcccctggaggccttgttgaagtaaatcgctgggccccctgctagagttgctgattcagtctgaggcagagaccgagaatctgcatttctttttttctttttttagacggagtttcactcttgttgcccaggctggagtgcaatggcacgatcttggctcaccgcaacctctgcctcccggttcaagtgattctcccgcctcagcctccttagtagctgggattacagggatgcaccactacacccagctaatttttttgtatttttagtggagatggggtttc[142 bp omitted]gcagctggtctggggactacactttgagaactgctgtgttagaggaacttaaaagagtgacccatgaggcctggcgcggtggctcacgcctgtcatcccagcactttgggaggccgaggcgggcggattacctgaggtcaggagtttgagaccagcctggccaacatggcaaaaccccgtctctattaaaaatacaaaaattaactggtgtggtggtgggtgcctgttgtcccaactattcaggagtctgaggtggaagaatcgcttaagcctgggagaagggggttgcaatgagccaagatcaagctactacactccagcctgggtgacagagcgagactcagcctcaaaaaagaaaaagaaaaagaaaaaaaaagtggccaatgagttgaaacatagtgatgaagaaggaaacggtgttggatcgagagcctgtgtgaaccctgtatatgacatgcaggcacctggccaaccaggaagaggtggctggaatattcctccggatctgcctgccaagctgtgtgccccggctcagttctgcagtgcttctgagggccatgcttttctaacacacacaaaggcactctataagctaaaggagctctgggtctgaaggcacatcatgtgggactgtgcaggctagcgacaagggtttgcaatggagggttttaagcaaa[152 bp omitted]gtctctattaaaattacaaaaaaattagctgggtgtggtggcgggcgcctgtaatcccagctacttaggaggctgaggtaggagaatcgcttgaaccctcgaggtggaggttgcagtgagctgagatggaaccattgcactccagcctgggtgacgagaaggaaaactccatcttaaaaaacaaaattcctctgataaatgggtaaacaaaatatggtctgtgtatgcaacagaatattaggcaatctttaaaaggaaggagattttgacatacactacaacatggattaaccttgaggacattctgccaagttaaataagtcagtcacaaaaaacaaatacggtatgattccacttacatgaagtattaatgtggtcaaaatcacagaaactgggctgggcatggtggctcacacctgtaatcccaacactttgggaggctgaggcaggtggatcacttgagaccaggagtttaaacccagcctgggtaacatggcaaaacgctgtccctacaaaaaaaagaaaaaaaaaaattagctgggcgtggttgtgtgcacctgtagtctcagctactcgggaggccaatgtgggagaatcccttgagcctgggaagcagaagtcacagtgagccaagactgagccactggactccagtctggccaacagattcagaccctgtctcaaataaataaattacagaaactgataacagaatggtggttggccaggagctcgggggagagaggaatgggtggttcacatttaatgggtacaatttcaatttgggaagat[134 bp omitted]acctccaccttccaggttcaagagattctctggcctc[220 bp omitted]aatgattaagatggtaatttttatcttgtatatattttaccacaattaaaaaaaaaagatccctttggcgctgtgtggagcaggaactgaggggcaggaggcagaagaggcgagagtggaagcatgacagtgtctaaagaggccatggggacttaaaccaggtggtagccatagacgggagagctgtggacagattctgcatctattttgaagacagagccaataggacctgatgatagattgcatgtggatggtgatgaaaaagaggaattggctgggcatggtggttcacgcttgcaatcacagcattttgggaggccgaggaggcagatcacttgaggccaggagttcgagaccagcctggccaacatggcaaaccccatctctattaaaaatacaaaaattagctgggcatggtggtgcacgcctgtagtcctggctactcaggaggatgcagcatgagaatcacttgagactgggagtcggaggttgcagtgagctgtgatcgcaccactgcactccagcctgggcaacacagccagaccctgtatcaaaaaacaaaacaaaacaaaacaaaaaaccaaaaaaaaaaaaagaaaaaagaatcaagggctgcttttctatttttggcctcaacatttgggtgaagatggacttgctttctaagatggtggagtaatgggaaggaacaaatttcttcgcaaggtgggggagagagtgaaaaattatctactgcccaccttaggtttgagatgcctattaagaaatccaagaggagatgtcaagtaggccatcggatatgagtgggaagaagatcagcgtgctctaggagcagaaaggaggcatgactggaactcattaaacacgaggagaagacagtggtagacaggtgggccagggcagattaggccaccgtgggcaaactggtcacaaagttctgagtcagccactcatcgcttgtgaaacctggggaaagttgttcatttatgaatataagacgaacaacttccatgtaatgaatgcttgttatgggtaagccactgtcttcgtttttatggcgcggagtcttcagatcagccggggaggtggaggatgggagggggattctcttatccttgttgtacggaggaggaaatacgctgcgggctggggtagggcttgtatgagccataatcaggtctggaactgtctagataaaaacttcagctgatctcttaggatgtctgtctgctctaaaatccaaatatgcttcttcacagttctgagatgcagaaactgaggcctcaggacggggcagtagtctgtccaataggggcacagcgaggacgcgtggcaggtagcgctgtcccccaattcaccccaggggaaactgaggctaaagagagggcggtgtcctgtccaggttcacacacaggaagagccaaaccgaggcccccgcgctggccccctcctgagccactgcccaccccggaacaggagggcagcctgctcacgtcctgattcctggcaccgacatcggcccttaagttctgcccgggtggagagggaggacaaaaaaaaatgcgatccgtagtcaaggagacgtagcctgcactcctgattggcgcagaactctagcctggtctcctcctcctcctcctcttcgcttgccagcttctagagctccggaggccccacctcccaaatgcccggcggtgcccggcctcccctgatctccacaacaacgccgccatggctcctcctcctcctccctctttttttcccggcacttctgcgcatgtccagggcccgcgcgcagaccactgggaagcctcctcgtgcattctgggaaatgtagtccaaagcctgtcgcgctcagacagcccgcgacatttgcgccgtcaaggccaaataggctgcagacgacgctttcgcgtatcttgggaaatgtagttccagtgttggcgaagacgccacgcggtgacaaacaggagtaaggcggtccccaggcgagggccaattggcagccgcctttgccgcgatgcttcctgggagttgtagttcggggtgaggccggggcttcatggggagttgttgggctgaacgagcggctcggagtatgggattgggggagggggacgggggagtttggcgcaaagcctgctggggcatggagtcccggcgagctttgtgcgcatgtgcggggaggtgagggggcttggggggcctcgcctgagagagtgaggtgagcgaggggggaaggagggagggattgggtgggggcggttggacgagggagggaccagaggttggatgggaagaggggcgccgggggcctcaggagggaaagatgggagacttgcggggaggggaggagaagggggctgagtgatggggaaggggctgggagagggaactagagggggagggacttggagagggggaggggtggatagtgggagggggtcgtggatcctcgaggtcctgaacgcgggagagaaatgctgagggagaggacgggggaggggcgcctgggggagggggaggggcgggacgggggagggacaggtgggggaggggaaggggaccctagcagagggtgggctgtgagatgaaagctgagtgggaagctggaccctacaaaggagtctgggggcgccgggaccggaccccttcggaaaggtttgcgggaaggggcttccggggacgatggttattgttgtaacgtagatacggcgcaggtggctcgttttgcgcgctgcttctacaagtgcaacttttacagagttgtgagattcctgaagataagaatcgttgctctgttttgctgctttctcagtgcggagcatctgcctttttagcttgttgcaaggcattattaccttcggtaatatgtgtaaagtgcttagaaactctgtttattgtcaaatgaagttgacccccgccacctctaccccagtcaggatggagtcaccctcctctatatccgattttaacgcctattccaatgtatacttagtattttaatctgcgtgcgtgttcatagcagtgtcccctgggcacctcgcagggaaacttcgacaaagtaaccctaagtctgactggacacttactagccaggtgtggttctcagcatttttgttctccttctatcactttacagtcaacgaaatggagatacagggtattacaaaaggtgccttgtacctcgtccaaggacacagagctggtaggaggcagagctggaatttgccccagagcctttgtgccgtaggtaaatatttgtccagtgggccagcggctctcaaccaggagtggttttgtcccccaggggacatgtggcaatgtctggagactttttttttggtttttccaacttgggaagtgctactggcatctcatgaaaagaggcagagatgctggtagacatcgtatgttgcacaggatagcccgccacgacacaagtgccattaatgtcgaggttgggaacctagagtagacaaaccggtctttgtcgagcacttagcctttggaggctgcttctaactcctgctcccagcagcctcttgagaggaaggagctcttgttagtcctgtgtctcaggtggagaaatgaagcacagagggggtaagtcacacgtccacagtcacactgctgatgagtggcagagctggaagttgaagccaggcagccagactccacagcctcttagccatgatattaacccagcatatgtgggtgctggtgccggggtactaggtggaactggtgtggactctggagtcacatctgggtcccatttgtggctccttcactctctgagcatctccctatggtaagaggggacccatctccccagctcacaggtctgttgggaaggttgggtggggcagtataagacactagccactcagtggctgtcttcaaggcatccagggtgcctggctctggactggactgtgctttgcggacacagacagctagacagcagggttacagctgttgaatgcacatagcacagggcgctcattggatggtagggtggattgacatggtggaaggcccttacttaacagcatgtgctttcttgggagcaggccttgtgctggatggccccaccgacccagtgaagagctggacttggtcactgccccagagagctcactttctggacagcccagggtgtagtgacctgtgatcacctctgagattgcaaacagggtcagcttgatggcctgtggcattgctctctggcggaaattcctccttagtcccagagggatcttttttatagcagagcaggcatctgtgtggcttttgagacttggatctggcctgggtcttccgataagtctttctgcctgctcccaggttcatcagcccttaaactgatggatgggtggggtgggaggtgatgctgtggcctggctgtggatgtgcaagtccaggctctgccacgtgttagctgagtgactttaggtaagacatctccccttgctcctgctgcaacttgggggtagtaacaccaacctcatgggattgatcagcctgtaaagtttatttgagtgctagccagaatgctggggttggaatatggagtctctcgcccacatgaattgtagtgaagaaagtcagcacacagatatcgtaacactagatcttgttaaatgctgaaagaaaactaataagggtgacgtcttagcaactgggggaagggcacgtgggtgcagcatcggagggggtgatctggggaggctctccaagggggtaataattgcatggaggcctcagtcatgagaaggagtcaggtaagcaaagattggggggaaagagtgatccagcgggaggcagcacaggtgcagaggccctgtggtgggcactggccttcggtccaagaagatagaaagtgagccagaccgggcacagtggctcactcctgtaatcccagcactttgagaggctgaggtgggaggatcacttgagtccagcagtttgagaccagcctgggcaatatagtgagaccctgtctctacaaaaaatataaaaattagctgggtgtgttggtgcctgcctgtggtcccagctgctcaggaggctgagccaggaggatggtttgagcccaggaggtcggggctgcaatgagccgagaggtcatgccaccgctccagcctgggcgacagagagagaccctgtcttaaaaaaaagaaaaaagaaaaaaagggatccattgtggctggagtatagagaatctgggagcaggcagagatgagaaagtagggctgggctgcatggtctcatggccatagtaagcaatttgggttttgagcatcacaggaagcagttggagggcactgagcaaggaagtgacagggatttacagtgaaaaagtttttgtgatcactgtggagtgatttggctctaggtggcgagagtaggcatacacgggtcttgtggcagccgtcccagcaatgagatgacgtttgtggttagtgacatggcggtcaggagcccaggctttggttgtatcaggaggaaaattgtctgaacacagacttcctctcagacctcaccggctagaagcagattatgtgcccaccctctgccttgtggtcaaggggactttgctatatagttccttatgatacagtccaagctgctgtaatgaagagaccccaagtacagggctccacataggacagaactgattcttttctcccataatactccagaggtgttctggggcgggctggcgcctgagccccatggggtcatcagggtcccttctgtcttgatcttccagtgtccttgaggtcaggggccggcagtcttgtcctgtaaagagccagcgagtgactatctttggctctgtggacagccttacaggccacccaggccctgtcacagccactcggtagctccaaggcggccgtggacagcgcgtgagcaagtgggcgtggatgtgcgccagtgagacttaagtaaaacaggctgcaggccagattcggcccaccagctcagagaccaccatttctcaaatgctttgaagtcaggactcctttctgccttcaaaattactgaagaccctaacatgcttttattgatgggagtcatatctattgttacgtatcatagtagaaaccaaaacagaaaattgtaaagtatttattaatgcatttaaaaatggcaatcacggctgggcgtggtggctcatgccggtaatcccagcactttcggaggccaaggcaggtggatcacctgaggtcaggagtttgagaccagtctggccaacctggcgaaaccccgtctctactaaaaatacaaaaattatccggacgtggtaacgcacgtctataatcccagctacttgggaggatgaggcaggagaatcgcttgaccctgggaggcggaggttgcagtgaaccaagatcgcaccattgcactccatcctgggcaacagagcgagactccatctcaaaacaaaaattaaaaaaaaaaatagagacaggagagctcgctgcctctctctattctacgccatgggaggacacaaaaggaggccgtcggcagcctggaagaggtgctcaccagaacccgacagtgctggcacccagatcgcaaattcccagcggaagggactgggacaggccgtcatagctgtcatagcggagcaccgtggactgaactgctatgagcttatttctcagttctgggagcgggaagctcagaatgccatcatggtcagttcctggtgagggcctctgccaggctgcaggtggcctccttgctgtgtgctcctgctggcagagatggacagagtcccggtgtccctttctcttataaggccacagccctattaggcccagcccttgtgacctcagttaactttcattaccagttaaaagcttcgtctccaaatacggtcacactggggtgagagcttccacatgtgaattttgggagacaaattcaggccacagcagttagttggggtggcttctgagtaggctgcaaagtgtctgctcccagggtgtggggtgcacggccccacaagtccagtgagggtggtgctgatggtgacctgctgctgccaggcctgctgcaagctctttctgtgttttctggttgaatcctcaggacaggctgcgggaggagctgcaggactgaggtacagaggccaggggcccagggcaggacccagcctggacttgactccctgggatcccaggaagggcacaccctttcctcaccacccgagtgagcgctgccccctcacagagacctctttgccccctgggccaggcagagcaggtgagtgctttatcttacaggggaaaccgaggcacagaggccgggcctatcctgggtatgtgggcggctcagaagcgcgggtcccaggccgggtgcagtggctcacgcctgtaattcccagcactttgggaggccgaggtgggcggatcacctggggtcaggagtttgagatcagcctggccaacatggtgaaaccccatctctactaaaaatataaaaattagcaggcgtggtggcggatgcctgtaattcccgctactcaggaagccaaggcaggagaatcgcctgaacccgggagctgaggttgcagtaagctgagatccgccactgcactccaacctgggggaaagagcgaaactccgtctcaaaaaataaaaagtaaaaaaaaagagcgttggtcccattgtgagtctgggcaccgcgggcagggtctcggcgggcaggggtctcaccggcttgttccctgcaggcgctgcggtccgggaggccccatggaggtggcggtgcccgtgaagcaggaggccgagggcctggcgctggactccccgtggcaccgcttccgccgcttccacctgggcgacgcgccgggcccgcgggaggcgctggggctgctccgcgccctgtgccgggactggctgcggcccgaggtgcacaccaaggagcagatgttggagctgctggtgctggaacagttcctgagcgcgctgcccgccgacacgcaggcctgggtgtgcagccggcagccgcagagcggggaggaggcggtggccctgctggaggagctctgggtgagcctggcgggactgcaagcggggaagggagaggggaaggtgccagggaagccaccaggaagcccagggaggagcaccactgaacccctgaaaaccagtgtgactcgcggtggggaggctgcggtacaggctgcggtacagcgtggagggacagtccacgtgcggcaccctccatccccacaccagctgcaagtcaggagggccccaagaccctggcatacttgcgagttctctaggactcacagccgtgttcacggtcacggcttatcagagaaggacgtgctggaagcagctgggaagaaggccacgaaggctccagggagcgcagttaccagctgtcctctccccgcaccccgcccgcacgcagggggtcttgccggccaggaattctcctcagaccgtggtgtcctgggttcttactggggactcctccccgttctgtgtggctgacctcagcctcccgccccctgaaagtcaaggataccccctggtccaaactctaccccaaattcatcttgcttttgggctggcctgagtcccccggggcaggcagaccctccttatcatgcgtgaggctccaagggctcagagatgacttcccaggggcagagggcaaagccaggcctctctgggcaggtttggtttcttgaccacacagcaggcaagggccgactcacgttctgggtgaagtcttggtgcacagccacacccacccactcatgtcacctggggctgacacttgccaccgtgatgaccacagagggcccgaggagctggaagtgttgactgcctggccccgtcagggaagttgccagcctggcttagagtcctgtcgggggatgtgttatgtgagctgcacatgccatcttaagtgttctagtcagcacgttaaaaaaaggcaaatttacttcatggaccccaatgtgttcaaaataccatcctttcagtagtggcactctcccatggctggtggctgctgtgtggggcctgggtgatgagcggtgggcagccacgcagagacctctgagaagagtggtccaggccacgagagcagccagtgcaaaggccctgagccacctcgagcggcacaggggccctgagtgagggggtgtttgcggccaggcctgagtccccagtggcaggagggtgaagagtcagagcagtcgcgtgttcctcataagtgcgtaccgagtgcctgctgggtgctgagatgtagcagcagagagggggcatctcggtgaggcaaagcgagcaaagccttcagtccatggcagccgggcggccttccttccttccagagggagcagctcccgtcaaggctgccagtggcctcatccgtctcccttctcatgcggcccgaccagcccccagacactcccccctcttattgtctgggatacagctcgcccctcctctgctcctgcctcctggcacctctgtgctggctctggcttctctatcctcgccctccttccgggtcattgttcccaaaagtgggttgtaacaaatcacaaacgcagcggcttacaaatcacaaacgcagcggcttagaaatcacacaagtctgttacagttctggaggtcagaagtccaaaatggtttggtctcatggcccaaaatcgaggtgtctgcagggccacgtcccttctcaagtctccaaaatcaaggtgtcatctgcagagccacgtcccttctcaaggctctaggagagaatccgtttccggccttttccagctcctagaggctgcccgcattcctcggctcatggcccttcctccgtcctcagagtgctgcactccgacctctgcttccatcccccatcactcctccgaccttgacctctgcttccatccccatcactcctccgaccttgacctctgcttccatcccccatcactcctctgaccttgacctctgcttccatccccatcactcctccgaccttgacctctgctttcatccccatcactcctccgaccttgacctctgcttccatcccccatcactcctctgaccttgacctctgcttccatcccccatcactcctccgaccttgacctctgctttcatccccatcactcctccgaccttgacctctgcttccatcccccatcactcctctgaccttgacctctgcttccatcccccatcactcctctgaccttgacctctgcttccatcccccatcactcctctgaccttgacctctgcttccatcccccatcactcctctgaccttgacccacttaggtcctgtggtcacttatttatttatttatttattttactttaagttctgggatacatgtgctgaacgtgcaggtttgttacatgtgccatgaaggtttgctgcacataccaacctgtcatctaggttttaagccccacatgccttaggtgtttgtcctaatgctctccctccccttcccccaccccccgacaggccctggtgtgtgatgttctcctccctgtgtccatgtgttctcattgttcaactcccacttctgagtgagaacacatggtgtttggttttctgttcctgtgttagtttgccaaggatgatggcgtccagttcatccatgtccctgcaaaggacatgaactcattctttttcattggtgcatagtattccatggtgtactgtggtcacgtcttaggtcacctgtgatgacattcggcccgtcaggatagttcaggagagtttccccatgtcagtgcttaactccctcccatccacagagtccttgttgccctgagacagcagatgacaggttctggggatcagaccgtgtacatctttggggccattattctgtctgccacagaggcgaggtgaatgcaaggtgaagtgggggtggaacagaaccaacgtggaatctgtgagcctcggggtttcgccctttccagtttccatgactcctcagaacaggacctggcacatgggtgctgtctaggtagatttcagccactgttaccactctgagctcatgccatctgttttgttggcattaaaatgttcttttaggaaaagatggtaaaagtaggtggtggttattgttgcttttaatgtatatatcttgcaaaataaaaaaaaatcttccattcggggatgcagtgagagttctgttggttcagtgaatctaaaagtcgggaaatcaccaggctccaggccgtcgggactctcctgcgttctctgcttgctccgaggcgaacctctcactgtggctctgggatgtctttagcatctctcttgtatctgttactctctctttttaataagggcagatctcaggttcagagccttctcctatcagtgtccacacagacgggaataacactgccgtgagtgatggaatttcccatgacctctctctctggcacatgatactggctttccatttccagcaatgatacaacatggtcttaagtcagtgttattttagttttaggtaaaagtaaagaagagtaataagagcctgggcgatagccattgtagctgacggtggtgtatagacagctgacatctgggggcgctgctgtggattggggtttcttggcatctggtctgtgggagctgacggtgacgcatagacagctgacatctgggggcgctgctgtggattggggtttcttggcatctggtctgtgggagctgacggtggcgcatagacagctgacatctgggggcgctgctgtggattggggtttcttggcatctggtctgtgggagctgacggtggcgtatagacagctgacatctgggggcgctgctgtggattggggtttcttggcatctggtctgtgggagctgacggtggcacatagacagctgacatctgggggcgctgctgtggattggggtttcttggcatctggtctgtgggagctgacggtggcgcatagacagctgacatctgggggcgctgctgtggattggggtttcttggcatctggtctgtgggagctgacggtgacgcatagacagctgacatctgggggcgctgctgtggattggggtttcttggcatctggtctgtgggagctgacggtggcgcatagacagctgacatctggaggcgctgctgtggattggggtttcttggcatctggtctgtgggagctgacggtggcgcatagacagctgacatctgggggcgctgctgtggattggggtttcttggcatctggtctgtgggagctgacggtggcgcatagacagctgacatctgggggcgctgctgtggattggggtttcttggcatctggtctgtgggagctgacggtggcgtatagacagctgacatctgggggcgctgctgtggattggggtttcttggcatctggtctgtgggagctgacggtggcgtatagacagctgacatctgggggcgctgctgtggattggggtttcttggcatctggtctgtgggagctgacggtggtgtatagacagctgacatctgggggcgctgctgtgcattggggtttcttggcatctggtctgtgggagctgacggtggtgtatagacagctgacatctgggggcatctagtgggagctgaccgtggtgtatagacagctgacatctgggggcgctgctgtggattggggtttcttggcatctggtgtgtggaaactgacggtggtgtatagacagctgacatctgggggcgctactgtggattggggtttcttggcatctggtgtgtgggtcctcgcctgtcctcagagttttcaccgagacattgccggatgagaaggagaggacagccgaggagaggctcctgtactggtagaaagcagtagagctcacctggaaacttttaaaaaatactgtcggccgggcatggtggctcacgcctgtcatcccagcactttgggaggccaaggtgggcagatcacctgaggtcaggagttcgagaccagcctggccaacatggcaaaactgcgtctctactaaaaatacaaaaatcagctgggcatggtggcacatgcctgtaatcccagctactcaggaagctgaggcaggagaatcgcttgaacccaggagctggaga[131 bp omitted]attcgggcctcagcttcagtaattttttaactgaatgtctccattctcctgttgaaggacatttgggttgattccagggttttgttttttttttttttttaatagagctggtttacgtctctgaataggtttctgtgtgaatacacgtttacatttatctagggtaagcgcccaggagtgcagttgctgggttgcgtgacgtcttagtctgtttgggctgctgtaacaaggtaccataggctgctggctgaaaacaacgggaatgtatttctcacagttctgcaggctggggagtttgagatcaaggccaactcagtgtttggtgagggtctcctgctggttcacagatggtggcttcctgctgtgtcctcacagggcagaaggggtgaaggggtctctctggggtctcttgtagaagggcactaatcccattcatgagggctcccccttcatgacctaatcacctcccaaaggccccacgtaatctcattaccttcagggttaggatttcaacatagaatttgagaggcacacagacatttggtctgcagcagtcttctgtccattttcagactgggttgttttcttgccctggagattccttcatgttagtctggatgcatcctctgccagctagtagactttcacattttttttaaaagtgcctcatgacctgtgtgagccactggagttggggaccaccaataagagagagcccgtcatccaggagggggcaggctcttccatttgggggagaacaggggacatttgggaatcacagcctccatggttctaaggactgttcccatctcctcagagtctaggggacttagagaaatatatagccttcttggctacgttggccttgtcgagtttgtttatgacttttttatggtatgtctagccccagctggaatgtagtctcatatagtctcctgtgggttggggccttgtcttttgttcagtgatgtgtccctggagctcaggatggtgctgggcacatagtaggtgctacaaaaatactcgttgagggaatggctaacccttcccagcctcctcttctcctgctgtggagggaatggctaaccgttcccagcctcctcttgtcctgctttgatatacaggatttgacaggaagaccagggtatggtcagcttcctcacttctgtggagagagaatctgatctgtccagaaagatcgaatgacctggctgtagtcactcagcatctggcctcaggcacacaatagggaaaggggatagtttaagacggatgggggcagggcgtctgccaatcggggaagtgcagagaaaagccagtggggtaggcctgggaggtggggagaggcagctccagccagtacctggttagcttgacaggaaatgccccagtcagcctgcgtctcaggtcggaattgaaggggaggccctggggctccagaggcagctgggagcacaggaaaatagcacagggtagctgttcaatgtagaagccaaactcagaagattagcagaggacaggttgataatcaaggtccaaactcaatatttgaaaagaatagtagaatagtgcaaaccttcagcaagttgactaggaggaaaacaagaaacagcacaaacactgatggtggaagcaagcaaagccggggatggagcggatttgacaaccgttgagaacaccgtgttcaacgtacacaatgcattcgaagtcctagatgaaatggacagttttctaggaaaatataaatcaccaacatatgctcatgatgtagtggcagatgtgagagtctggaaaccagaggggggagatcaaaaggtgatgaaagaccttcgcgtatagaaggcactggattccagcactttatgtgtaagttctaccaggcctccaaggaactgatcattctcatctgttcttttttttgaggcggagtctcactctgtcgcccaggctggagtgcagtggcgtggtctcggctcactgcaacctccgcctcccatgctcaagcaattctcctgcctcagcctcccaagtagctgggattacaggtgcatgtcaccatgcctggctaatttttttgtatttttaggagagacggggtttcaccatgttggccaggctggtcccttttacacaaacttccagaacacagggaaggtgttcctcagctcactggcaaggctgccacccccacccccacccccaaccacctaacaggacaaggacagcacaggaaaagaaggttgcagccagtctcatgggaccctcaacagaacatcggcagcttgattccgcagtgggtggacagacctatgtgctggggcaggtggagcttagcccagatacacgaggatgcttcatccttaggggatcctcagcagaacatcagcagcttgatcccacagtgggtggacaggcctatgcactggggcaggtggagcttagcccagatacacgaggatgctgcatccttaggaagtctctcagttagtacacagacttcaaagccgaccagagtctctcagttaaagtacacagacttcaaagctggatatgagtcctgcctccaccttttccaagctgggtgaccttggacgcatgtctgggactctcagagccttggcttcctcagctgcaattttggaatctcgattcctgagccctccagggatgggtgtaaggagggctccatcaggcagtgtgttcctggctgtgccaaattggctcagtcagtcacacacagggtcacagcttattacagagaaaggacacagatgacaaccagccaagggaagagatgagtggaatgggtggaggaaggctctgtgctcggagctcccaactgtcctcctgccgtggagtgtggacggcgctaactcctcccggcaacaacgtgtgacaacctgcagggggtgctgctggccaggaacgcttccccgagctcggcactcggtctctgttggggttgtgtgtagatatgctgaccttcacctccatccctggcagaggccgagctgatgcacatggcccagacccccaaccctgagtcacgctgtgggctcagcccacccgggtggcccagggccccaggtgagcagaccctgccatcaggcagtgtgttctgggggcatagaggtgaccctccctggagccaagggcagaggccagacctctctggacagggctgagcctcactgcacagcagcagcatctcgtcagtctccacgcagcctgcagggtccgtcctgggtactggtgtcatctcagggaaggaaagcagcttgcccgaggtgacacagctggttcaggggcagggggggatctgtggaaaaaacgtactcaaagtatctttttctattctcagcatcagtgaccacagaagacgtctgtgaccaaatgttggagggggtgtcccctcacataccgaacaagcaatcaactctgcagcagacacaagctgggtgtcctctaatgcatttccaacatggtctccctggagacagtgccagatcccacaggttgagggctcacatcccaagactgaccccccatttctgatgccagtcacaagccccaggttatttcatctgtgcttccaactgacaggctgtacatcgggctcccacagcccttcctctggttccgttaatttgctagtgtgctcacagaaccagggaaacatgtttaccgatttattgtaaaggagattttaaaggataccagtgaacagccagatggagagccacgtatggtgaggtctggaagggttccgagcgcaggggcctctgtccctgtggacttgggatgcaccatcctcctggcatgtgggtgaggtctagtttaccttgctgtccacctccacgagttcagctctctggaagctccctgaaccctgtccttttggccttttatggagacttggttgagaggcataactgaagcatggacagccatgtagaaatgtgattagataaaacgggtgtgatcgaatccgagtagaccgagcggggaaacctcgcaaggcctgtgtgttcagacccttcttggcctcctttggctttctttcctccagggtaggggcaggaccccttctgaaggggggtgttatggcccacaatcagacaaattaggtcagaaaaattttttatggccagaggtgggggaagatttaaggatatttttagtttttaaggcctgccttgtggagaaagaagagcaggtgaaagtagggcagaaggtcagggagagactctttttctgaggcctaaagcttcccatcgttagaacaagaccgtaacaagggctgtgggagtcatgagccaggagccgtggacagagcccaatgtatacgtatcataaaatcacagggagggttaggaccccggggctgctccatgctccccccttctgtgtgcctggccccacaaggcgcgcctgtccccgcatgggtgtgccctggatgtctcttcctgtggacaatgcctggccagcgtcccctgtctctggggcctcaaaccaggaagttccccgaggaatgggtggatctcaggcttttctgtgcccaagatctctgggagaaccgtctgctggcacggcttcccaggctccactctcaggtgtgtcaaccccggtgcccttgagctgaggccaggacagcacccctgcccagcctctgcctgtggctgacaccacacaagggtcatgggagccccgccaagggccaaggagctggagggtggtccagggtggtgctctgggcccgagtgagactgtgctcttctgactctctccgatgggccccagagcccatcacggtcccacagccaggttgcgaggcacctaggatctagtcagcgttgtgccaagcccccatcctcatgcctcagctgcctgagtcactgggattacagtcatgagccaccaggcccacgctcttgtattttgacccccttatttaggaaacgttttcttgtctgtcagagtgagggcaggtggtttgcccctgccgctttgcttttttttttggagacagagtctcactctgttgcccaggctggagtacagtggtgtgatctcggctcactgcaacctccgcctcccgggttcaagtgattctcctgcctcggcgtcccgagtagctttgattacaggtacgtggcaccacgcccagctaatttgttgtatctttagtagagttaggatttcaccatgttggccaagctggtctcaagctcctcaccttgtgatctgcccgcctcagcctcccaaagtgctgggattacaggtgtgagccacctcgcctggcctaggcattgctaattttcacaccagtgattgctttgtgatccacgtactcctctggccaaaaatatttgaaacggggaaaaggtgtggtgcgtgacttagctgtcataggcaccagaagaattctcatccctttcccttggggacgtggttttgaggaattatgtagtagggcgaagaaaccacaacgagttggactgaaactttttaaatttttggtcttcctggttggtgccgtcctgcttggcagctgttctgctgtttcacaccaagaaaagttgtttctgaacttagtttacttttttcccaagttaaaagtagcttatatattctgcattttgttaaggagcttgcactttatccaaagggcaggacgaagctgatctgagacaggtgtattagttatttcttgcttcctgacaagtcaccccacactcaggggtgtaaacagtaacatctgtcagctcagaaagcctctgtgggtccggagtctgtgagtggcttgggcacgcggacctggcccagggtctcctgtgaggtcacagtgcagtgttggccaggctgtcatctgaaggttggtggcttcaagatggctccctggcagggggttggcaggaggccttggttcctcacctgggggcctctctgtggggcagcttcagtgtcgcccagcatgactgtggcttcctcccagcagggatgggattgcacagctggtcgacggtggttgggagagggagaaatagaggcccttgctcaggtttctgagttcaaaactgtgctctcatttcaggggccagcagcctcccccgatgggtcgtcagcaacgagggtgcctcaggatgtgacgcagggccctggggccacaggtggaaaggaggacagtgggatgattcccttaggtgagctgctggcctctctggttctccccgccagcccccagcaccggggagggggttcagtgaacgatcctggcaccaggacccaggacaaggacagacttggaccccagcccttgaggagccccggggttcggacccaaggggcgggcattgggggtatgggtgggcctcggggttggaggttcatccatccatctatccatccatgcacccatctagccatcatccaccctccacctatccattcctctatcatatacccacccattcacccatccatccctctatcattctcccaggcatccatccatccttcacatgttccccctcacaccaatcccaccatccctctgtcatccatcatcatcacccatctatccatgacccacccatccatccatctactcatccacccatgcacccacccatccatcatctgtacattcatccacccatcatccgtccatccatccacccatcatccacccatgcattcatcatctacccatccatcacccatccgtccatctagtcatccacccacccatccatcatctgtacattcatccacccatcatccacccatgcattcatcatctacccatccatcacccatccgtccatctagttatccacccacccatccatcatctagacattcatccacccctcatccacccacgcattcttcatctacccatccatcatctgtacattcatccatccatcatcggtccattcatcacccatcatccacccacgcattcttcatctacccacgcattcatctacccatccatcatccagccagccatcatctattatgtattgggcattgactgtatgccaggcactactaggtaccgggacacaggtatgaataagaagcccacagcccagccctcttcccaccccaatggtttctgcctttaagcgttccctccctgcctccaccccagcctgtgctgtccttgccccgccctcgtgccgacccagatgctgactctctttcttttcccagcaggcaccgcccctggggctgaggggccggcgcctggggactcccaggctgtgcgcccctacaagcaggagcccagcagccccccgctggcgcctggcctgcccgccttcctagcggccccgggcaccacgtcctgccccgagtgcggcaaaacgtccctgaaaccagctcacctgctgcgccaccggcagagccactcgggcgagaagccgcacgcctgccctgagtgcgggaaggcctttcggcgcaaggagcacctgcggcgccaccgcgacacgcaccccggcagccccggcagccccgggcccgcgctgcgccctctgcccgcccgtgagaagccccacgcgtgctgcgagtgtggcaagaccttctactggcgcgagcacctggtgcgccaccgcaagacgcactcgggagcgcggccctttgcctgctgggagtgtggcaagggcttcgggcgccgcgagcacgtgctgcgccaccagcgcatccacggccgggcagcggccagcgcgcagggggcggtagctccgggcccggatggtggaggccccttcccgccctggcccttgggttagccgcctcccggccagcgccatctcccgcccttggtgctgcccccgggcggtacctgctctctcccagcgccacttggcctcttcctctcctccttccctcccatcgtcctcctccacctgcgcctcccttgtctgaacttcccaacgccttcctattcctttccaactccttttcccccaaatttcactttccttctcaggtctcacctcagccccccccttctccctgatttctcggcctctctctctgtgtgaaggggcctctccctaatgtctcctccttcccccctcttctctctcctgcggcccagcctccctctccctcctccattcctctctccctgcccttttcctgcctgaagagcagaggtgaggacctgggacccctgaggggcaggccaggaggagctcgggcgcaggccaggcccccttggtgaagcagaggctgaaggaaaggggtctgggtcttgtccctaggaattctcctccctcaggagattgggggttgggggaggcagcgggtgatggctctgaagctgaacccagggcctggctgtggtcttcttggtcttgctgccccctgtgacccaaaggcatgggatggacagagatgcctgcccccgtgaagctggttggggagggcagttcaccagcatccatagagtaataaagtcactgtgtgtagacccggagtctgagctctgtctggagtctgtccggcacagccaccctcccagggccgagcgtctggggtgcccggggcttctggggtcagctgtcttggctcccaccacagactctcttggcatgagagaggctctgggagtctgggcacagctgtgggaggcagtgcaggaaatgtgtcctcaggagggctgtccccacctccatcctacggaggcagggatgaggctcctggaagggacctgccgagtgccacactgagtcaggttcgcatctgagcccttcagcttcctggctgggaacctacaggttggtcataccctctgggcatgagttccacatccgcaagtgatgataatggcacccacctcccttgctaaggccactctgtttgactggggtcctgagtgtcagtgttggtaggtcttgggtggcccattctgccacgcaaggaattctctcacctttagctggagccattggccgagggggggactccgtatggagggcaggctttggccagctgcatctttccaggatgccacctcttgtcagctcagcgagcaaccccggttccttctctccagagaggaaatctgtagcctctgccgggtggatgaagggcagttgccgggctttggaaagcgtaggatgagagcgctggtctgaccactcccctgccgcccagtcttggggctggcttcaccctggtccttttggttcctgtgtgcccagcgcctgagcctgggaggggttctatgtcaaaccctccatggttgccgccttgtggctgagcccgccacggtaccaccttgcgtccaagcccccccacggtcactgccttgctctctgcttcagcttctggctcagtgtcaagggctggggcaggtacagcctgtgccgggctgcgagggcatctggaaacagccacctggacggtccagtgcacatcactggagtctaggtctgccttcaagactcaacagtgcagggaagggtttaggtgccaggctatccaggaagggcaagtgaccacaggcctcagcacccacctcctaagacaggactggtagtaatgcccctcctgaaaagggactgtttttgaaaattaaataaggctgggtgcagtggctcatacctgtaatcgcaacactttaggaggctcgggtgggtggatcacttgagctcaggagttcaagaccagctcggctaacatgctgaaaccccgactctactgaaaacacaaaaattagccaggcatgatggtggacacctgtaatcccagctactccggaggctgaggtgggaggatcacttgaacccaggaggcagaggttgcagtgagctgagatcgcaccactgccctactccagcctgggcaacagagcgagacttcgtctcaaaagaaaaataaggtaatgaatgcagaatacttacgggaacttggtgtgtgatctcagcctgctgctttcacactgacaggtgcatgttaaggacgttaccatgcccaccgtgtggggaagaagacgggctgggagaagccgtgtcgtctgctgcagactttcaggaagtgactaagaggcatgagagggagtatgaggtggtgtcaggccagggtctgaggacagggttctgataacagcaaacacagagtgagtctgctgggccagacctttttaaaatccagtttgtttatcatcataaccaaccgatgaggcatgcactgttgttatccccatggtacagatggggaaactgaggcaccaaaagagtaagggaccgggccacatctgtggatctcatcccaggtgtctgggctcacagtattcactccagctcctaacagcacagctgctgcttttgcccattcaggctccatctcttctcttctgaaaagcctcccgggacttctgtgcccctttggggacccctccaacacacacacacacacacacacacacacacacacaccccgtgtctggtctcggagggacagtcggccaggctgtcctgccccactcttttgtgtcactcaagatggacagtcccggatggattggaggatgctggaagaacacccctgcaaaggactagaaacaaggcgagaccagatagatggagatctgactcccgcaccctcctgcacccacacctgctaagcctgggggagctttggtttgacatccgatgacgagtggtgtctgcctccgaggctgtataacggagtggaggatgatcccccccaaacaggagggaaattctggaaggccgaaacaaaacttgaatattctccgcatgggcaacagaaaactttccagagagacaacctagcagtccttcctcagagtgggcggtacttccacgagagtgcgcagcctttcctcagactgcgcagtccttcctcagagtgcacggtccttcctcagagtgggcggtacttccacaagagtgctcagcccttcctcagactgcgcagtccttcctcagagtgcacagtcctttctcggagtgtgcaggccccagccagacagactggcacaggtgcatccgcagaaggtcctgcatagcgctgttcctcatggtgctgcttgggatggcagagaatcagagcaacgtaaatgtccgttactaggagagggggaacgaagaaacattgttcaggaaaagtaccgaaacgtggaagtaggcaaaatgtcaattgtgcagccttctaaaatcatgctcaattgtcttaaaaatagtcctgcctgggccgggcactgtaatcccagcactttgggaggccgaggtgggtgcatcacttgaggtcaggagctcgagaccatcctggttaacatggtgaaaccccttctctactaaaaaaaaaatacaaaaattagccgggtgtggtggcgagcacctgtaatcccagctacttgggaggctgaggcaggaagatggcttgaacctgggaggtggaggttgcagtgagctgagatcgcaccactgcactccagcctggatgaaagagcgagactccgtctcaaaaaaaaaaaaaaaaaaaaggaaagaatagtaaggaaataaacccaacagctctccccaccaatatccactctgatggagcaggtgccatgagggctgtcctgtgactgatacccaccatgtctgttggacactatcacatctacgatctttatccatcaaccccaataccacagaccagagaacatctgaattgtggttttggatgctggccttgactttcttgcttccgtctttattgcttgaggggtgagattgttttaagaacctgctggtggcatgaggtgatttttttttctgcttcctctcctgggggccctggcaccaggggctctgccaggacccagcaggggttagttaattctactcaatttccctgggtgactgcccctcccctcaccccttcctctcccctgctaaagggttccggctctggggttccatacaccaggttcaaacctcaactctgcttcttccttgctgtgggaggaggtcgatgataggagtatcctggtccaagccgctccagtcctggtctctctcacaggtgattgctaactgggtccccaatccataaaagttagctgggtgtggtggcacatgtctgtaatcccagctgctcaggaggcttgagtcaggagaatcgcttgaacccgggaggtggaggttgcagtgagccaagattgcaccactgcactccaacctgggcgatagagtgagatcctgtctcaaaaaaaaaaaaaaaaaacaactagaagtttcctgatggggtggtccctgtctacctcgtaccctccaccctccccagttagtctgcattccaggtccagctcatcacccagttccttcagcccttccttcctccaccccactacaggacttttgcacaggccattggctccacatattaataaaatgttgttctttcttcctgcatttgcctagtgaacacaagagcaaaactccatctcaaaaaaaaaataaataaaaaataaataaaataagggcatgaatcccattcacaaggatgaagccctcatgatgtgatcatgtcccaaaagtcctacctatttactatctattgtctatctatctatctatctatctatctatctatctatctatcgttatatctccatctgtccatccatccatccatccctagactgctcaacagacacgctacctcttaatattctcacgttgggtattagttttcatcatatgaatcttcaggggactctaacattcaatccataacatgggggttacagtgagggctaaatggggggagtccacaagtcatgctcacgcctgtaatcccagtgcttaggaggccgctgcaggctgatcacttgaggtcaggagtttgaggccagccaggccaacatggtaaaacctcatatctactaaaaatacaaaaattagctggtgtggtggtgctcaactgtagtctcagctactaagaaggccgaggcaggagaatggcttgaacccgggaggcggaggttgctgtgagccaagatggcaccactacactccaggcttgggtgacacacagcaagactccatctcaa[136 bp omitted]atggtgaaaccctgtctttactagaaatacaaaaattagccgggcatggtggcgggcgcctgtaatcccagctactcgggaggctgaggcaggagaatcacttgaaccgggaagctgagattacagtgagccaagatcacgccactgcactccagcccgggcaacacagccagactctgtctcaaaaaaaaacaataaaaaaaaaccccaaaaaatcattaaatattcacgattttgggggggcagtggtgagccagttgttaaactgttggtatgttgaaattggccctaatggaatatttacactatgggaattggctaacagtacaaatgcaggcatttattttattttattttaaaaagctgacattggctgggtgaggtggctcacacctgtaatcccagcactttgggaggctgaggtggatggatcatctgagactgggagttcgagaccagcctgaccaacgtggagaaaccccatctctactaaaaacacaaaattagccaggtgtggtggtacatgcctgcaatccccagctacttgggaggctgaggcgggagaatcgcttgaacctgggaggcagaggttgcagtgagccgagatcgcgccattacactacagttacttgaatgacagtgactctgtctcagaaaacaaacaaacaaacaaatagaaaaacacagaaatctagatctttatgtaaaagttttgaaaccctatatgctcgtgattcgatttgcaattttcaaaacactgtgtggaagtttagcccagtgtggcaagcacacgcctgtagtcccagctacccaggaggctgaggttggaggattgtttgagcctgggcagtcaaggctgcagtgaaccaagatagtgccaccgcactccagcctgagcaacagagcgagaccccatctcaataaaaataaaataaaataaataaataaataaagcaagcaagcaagcactgtgtgagctacaatatgaaggaaccaaaacaaacaaaaatcataatgcaaacaaacaaacccaaagcacgtctgagggtctggttttggctgcccgtttgcaagttctgagctggttcctcagtttaccaaagaggagatggaggcccagaagtctgtagtgaattccctgcagccccatagcgggccagtgaaatgtgaggttgtttcctcattgctctgagagttggcattgagtgaagatgagtccccaacccctcctctctgggggatgaagtggtagaaatggctggcagggaggctgaggttggagcaacactgacctttggaattatgggcaggaaatgtgtggggcttttttttttttttagatgaagtcttgctctgtcccccaggttggagttcaatggtacaacctcagctccctacaacctctgccttccagtttcaagcaattctcctgcctcagcctcctgagcagctggaattacaggcatccaccaccattcccagctaatttttatatttttagtagagacagggtctcaccatgttggccaggctggtcttgaactcctgacctcaagtgatcctcccgccttggcctctgaaagtgctggggttaaagacatgagccaccacgcctggcccggggtcttaatcctaactaaatacccaaccttaagcaacagcatacccatgtcctttagagggttaactgtaaccccttaatttgggttcatggtaaggaagaactgatccagggagacgatggaatattcagcacaatggacagagacatttcctccaagctgagttaggggaaagaaaggtgcagacttccccgcccccagtgctgacctcccatctcaggtggggaagagaaataaagcttttgtacacgttttttttgttttgttttgttttgagatagagtctttctctgtcgctcaggctggagtgcaatggtgagatcttggctcactgcaacctctgtctccctggttcaagcgattctcctgcctcagcctcctgagtagctgggattacaggtttgtgccaccatgcccggctaatttttgtatttttagtagagacagg[143 bp omitted]cctcccacttttcattgtttcgtttagtgtatagatggggaattctttggtgagatgcaaagacaaatataggtttacattttgacatcttaggagttttttgtttttgtttttctgagacaggatctccctctgtctcccagactggagtgcagtggtggcatcaaggctcactgtagcctcaacctcccaggctcaagcgatcctcccacctcagcctctggagtagctgggactacgggcacatgtcactacacacaactaatttttgtatttttttgtacatggggtctcgctaggttgccaaggctggtctcaaactcctgagctcaggcaatttgcctgccttgaactcccaaagtgctgggattacaggtgtggaccactgcacctggctgttttttatgaatggcgaactgctggatgacacagaatgtgggcatggatttttaaagcctgcctagctcacaaggggtaaaatgtgtctatttaggaagatatgcccattgacatctgaacaccgaaaaacacctccatgctgtagcccttcctcaaaccattatgatacccagagttattaagaaagatgcagcctcccacagttacatcaacatcctactccaactttccatggagctcattttattttacttttcattttttccaaacctactgtgttgcaggttcttttttttttttttttttttttgcgacggagtctcactctgttgcccaggctggagtgctgtggcatgatctcggctcactgcaacctccgcctcctgggttcaagctattctcctgcctcagcctcccaagtagctggaattacagatgtgccaccatgcccggttaattttttttatttttagtagagatgagggttcgccatgttgagcaggctagtcccgaactcctgacctcaagtgatcccacgcctcggcctcccaaagtactgggattacaggtatgagcctctgcaccccatgagagtagattttaaatgctttcagtacaaaacgatgtctacgagctggtggatgtgttaattagcccaatttaataattttacagtgtatacatagatcaaaacattatgctgtatgccataaatagattcaatttgtatttgtaaatttaaaaaaattttaagaaaaaaataagcaaatacataaataagtaaatagacatatttttaaatggtggtcataataaatgtccctgagaagaggataggaagtcatccacacgtagctggcaagaacattccaggcagagacaatggcagaatgcactctcttttcccactcttgtcaacattctacctgcttttcaatttaactaatatca[132 bp omitted]aaccccgtctctactagaaatacaaaaaaaaattagccgggcgccgtggcgggcaccagtagtcccagctactcaggaggctgaggcaggagaatggcgtgaacccgggaagcagaacttgcagtgagttgagatcgtgccactgcagtccagcctaggagaaagagtgagactccatctcaaaaaaaaaaaaaagaaaaaacaaaagccagctgggcacagtggctcacacctgtaatcccagcactttgggaggccaaggctggcggatcacctgaggtcaggagtttgagaccagcatggtcaccatggtgaaagcctgtctctactaaaaatacaaaaattagccaggcgtggtggtgcacacctgttatcccagctactcgggaggctgaggcacaggaatcgcttgaacctgggaggtgggggttgcagtgagccgagatcgagccactgcactcccagcctgggcgacagtgtgaaactgtgtctcaaaaaaagaaaaaaaaaaaagaaaaagaaaaaacaaaagccataaagatacaactcaggctgggcgcggtggctcatgcctgtaatgccagcactttgggaggccgaggcagacggatcatgaggtcaggagatcaagaccatcctggctaacatggtgaaaaaccctgtctctattacacacacacacacacaattagccaggcgtggtggtgggtgcctgtagtcccagctactcgggaggccgaggcaggagaattacttgaactcgggaggcaggtgttgcagtgagccgagatccagccattgcactcccagcctgggcaacagagtgaaactgtgtctcaagaaaaaaaaaaaaagagaagaagaagaaagaaaaaacaaaagccagaaagacacaactcagcccaccaacatgggagagcatgtcatttcccacctgggcgcctccggtgtacactgtttcccgctttccttctgattcaaggtcacgggaggctgctggctgcttctgcactcttgtttttgtaactggatgtccgggacctttggaaggcgaaggcacctgcttatttcatctcctccccaccgttgtcatgggccaaactccaggatgtccttccgccctggttagctcccgccatgagtcagccctctcctctccacgtgcccccacttgaaccactcctgtgaatgcagcgtcagcatcgatgatgtatttcacatgcagctctcagctttggacattgcgttggctccccttcactctgactcaccttgactctgcacagaaatgctcctgggagagaacgctgacacttctcttcctgactgcagattcccgtcctgtggccgcttccacatctgaatctttccaatagtgggattttcagcctcacccacccatgcctctttgaaaagctaagaatgcaacccctcttgttcaataattcagttaggtgtttctagcacatgaccaatacttaggtcttttccagcccctcccatgaactttccctaaaaaatgtaactttctcaagtaaaatgggaatctttctgtggtgctggtgggactgaaaactggtatgtgattgtcgaaaggcaatctggatgtgtatactaagaatcccagaggctgggcgtggtggctcacacctgtaatcccagcattttgagaggccgaggcaggtgcatcacctgaggtcaggagttcaagaccagcctggccaacatggtgaaaccccatctctactaaaatacaaacaaattagctgggcatggtggcaggtgcctgtaatcccagctactcaggaggctgaggcaggagaattgcttgaacctgggaggcagaggttgcagtgagctgagattgtaccattgtactccagcctagggaacagagcaagactccgtctgaaaaaaaaaaaaaaaaaaagaatcccagaatggttataccttttgactgagttgcttttcttctaggacttaaacctaaaggattcgtcagaaatttgtaggaatggcactaaaaaggagtgaactgttgacacacaccacagcgtggatgaatctcatgcactaagtaaaagaagtcagactgaaaaggctgcacactgtaggatccagtttgtataacattctggtaaaagcaaaactttgtttttattttatttttacttttgagatggagtctcgctctgtcacccaggctggaatgcagtggcatgatctcggctcactgcaatctccacctcctgggttcaagcgattcttctgcctcagcctcccaagtagctgggattacaggtgcacaccaccacgcccagctaatttttgtatttttagtagagacggggcttcaccatgttggccaggctggtcttgaactcctgacctcaggtggtccactcgccttggcctcccaaagtgctggggttacaggcgtgagccaccgtgtctggcctatcacaaacattttttaaataacaaattagaaaaacacaaccacaaggaaactgtgggatgtggtgatggtgtcagggacgtttgtgtccacactcgtcacatggtaacattacgtgcgtttttggtacaccaattatacctcaataatgtggttttgaaaataaatctaactcaaatggcttaagtgtggcagggagcaggaagcgcagaggtgggggccgccaggctcccaggcccagctcccggtgtttcccaatgcctggggctcagctgcggcctgggctttacgccccctcctggcgacagaagacatagcggctccccgacttcaggcttctcccacaacatccaggaagggaggaagagagaggagggggagaaggaatgggggcaaagggagaggggaagcgggagacagaccagagaaatgaaatgtggtgaaatgtaagcatttggaaaatcagagtatctgggaattctttgggcaactttcctgtaagtctgaaattacttcaaaattaaaaaaaaaattaagggttgggcgcagtggctcacacctgtaatcccagcattttgggaggccgaagctggaggatcacctgaggtcaggagttcaagaccagcctgaccaacatggtgaaaccctgtctctactaaaatataaaaattagccggccatgatggtgggtgcctgtaatcccagctactcgggagggtgagacgggaaaatcgtttgaacccgggaggtggaggttgcagtgagctgagatcacaccactgcactcccgcctgggcagctgagcaagactccgtctcaaaaaaaaaaaaaaaaattaagggccaggtgcggtggctcatgcctgtaatcctagtactttgggaggtctcgacaggaagatcacttgagtccaggagttctagaccagcctgggaaacatagcaagactcgatctctataaacaaacagaaaaacaaaaattaaccggttgtggtggcacatgccggcagtaccagttactcgggaggctgaggtgggaggattgcttgagcccaggaggtcgaggctgcagtgagttatgattgtgccactgcactccagactgggtggcagaacaggaccctgtctcaaaaaaaaaaaaaaaaagaataaatttttaaaataaataaaaacaaaaagtaaaaaaattgaaaggaaactccaaggggaaaaaataagtttaaaaagaacaaggaggccaggcacggtggctcatgcctgtaatcccagaactttgggaggccaaggtgggaggatcgcttgaggtcagtagttccagaccagtctggctaacatggtgaaaccgtgtctctactaaaaatacaaaaatcagctggatgtggcggcacacgcctgtagttccagctacttgggaggctgaggcaggagtatcgcttgaacctgggaggcagaggttgcagtgagactccatcttaaaaataaacaaataaataaaagagcaaggaagctttgtttttagtttcttttcagaagttccccagcaaatgtcttttctactctccctggctggaatggattgtacacaggaacctggtacatgtgggcgccaaggtacctacccacactgaaggaaagagagagggaaggatctgttcagatcccagtctccttctcacccctaggccaggcatagagtccacaccctcatggcatgtggggcgcctggaggagctgcaggcatttaactaaaagccagccagattcatctccagccagagccaggtggatgctgggtcagaaactgcagcgtcctctgaaggaaagggtgctcgtgtctgtagcttgcatttactaagagggacacagactcagttacagaaatgagaagaaagatggccgggtgaggtggctcacacctgtaataccagcattttgggaggccgaggagggcaaatcacctgaggtcaggaattcgagaccagtctgaacaacatggtgaaaccccatctctactaaaaatacaaaattagccaggcttggtggcacacacctgtagtcctagctactggggaggctgaggcaggagtattgcttgaacccaggaggtggaggctacagtgacaagagattgtgccactgcactccagcctgggtgacggagtgagactccatctcaataaaaaaaaaaaaaagaaagaaatgagaagaaagtgacattgtgacatttcttgcaccacatttgagttttgcgtgtgtgtgtgtgtgtgtgtgtgtgtgtgtgtgtgtaagagagatagagcaagctttggacctaccccgtttacttttcacaaactagctaatgggcagtgaggcaaggacttcccactgtttctctgaccctccattgggctccaggtaacccagcttcaagctctcagcgtcgcctcctcagtcctgtctcccgtgcagtgggcgtcactccctcctcctttctccttcccagcaaagccattcacaccttcttgtcagtttgtcttctataaaagcttccccctcctcctcctcccctgcccactcctcctcctcctcctcctcctcctcctcgttgttgtcatcctctggatgagaagtgagggacttggagaaacagcggagggggctcaggagcccaccagggtgtctgtaatcccccacgtcgtcttctcactccatccctctcctggggtctccctttccccttgggatgagaaaggatggggtaagggctgatggggatgtgtaaagacaggacagagatacaagtgccagccacaaaccgacagaatgctggaaggaccttggaggcaatgtgtcctccacggtggagaggaggagacagaacccagccaggaccagggcgtcccctctgtcccttagacagcaaagggcaacagcaagagtaaaacctcttccaaggttctttcctctggaaagcaggtgacgtcagggcaaagagagagcgtgctgcagagacagatagatcaacacacatgacaggagagagacgcagcaacgacacactccttattcgttcacccaacaagtattgagtgagctccgggcactgttttaggggctgctgtgaggtttctcatctttggagctattgactttcggggctgggtccttcccatcggggaggcctttcctgagcactgtgggaggctgagccgcgtccctggcttccacccacga[133 bp omitted]ccaacatagtaaaactccgtctgtctctactaaaaatacaaaaaattagccgggcgtggtggcgggcgcctgtcgtcccagctactcgggaggctgaggcaggagaatggcgtgaacccgggaggcacagcttgtagtgagccgagatcacagcactgcactccagcctgggcgacagtgcgagactccgtctcaaaacaaaaacaaaaaaaacgaacaaacaaaactgtctccagacttggtcacatgtcctggggtgaggctggggcagcatcggggcagagtcactcctggttgagagcttccggcctagggacgcagccatgaacaagacacagttgacacccctcatggggtctcctttagccagggtggtaggtggggggcggggagatagacagctcacaagtaaacaaataaacagggtctaccgtgcaagacagaagaaatgcaactcagtgagggagctgcggaggcttggagggattgatgggggcagaggggacagggctacggagacaccagtggcaggtggagacaaccaaggaagacacaggtcaaggcccagacgcagataagagggagggagggagccctcgaatagctgcaaagtctggaacaggacagctggaagataaaggggcacagaaggagggggaagggcagggtctaccaggggaaaccaaggcacagcagcatttcccgcgatgaagtgtgtgttttgacctcacagaccagcgtttgaaagcccctggagtggatgactgttcccccacctccatcctcttcactccctctcccttcttctaatcccctccctttcccccctcccttctattgtctcctcagaaggcataaaagctcagggggcgtgaaagagtccaggcgctggagcgaggagccagagagagctgcggagagctgccagctgcagcggggtgagagcctaggccaggagggcagaggggcggatcccagctgcaccggggtgagagcctaggccaggagggcacagggtcggctgccagctgcagcggggtgagagcctaggccaggagggcagaggggcggatgccagctgcagcggggtgagagcctaggccaggagggcacaggggcggatgccagctgcagcggggtgagagcctaggccaggagggcagaggggcggatcccagctgcaccggggtgagagcctaggccaggagggcagaggggcggatcccagctgcaccggggtgagagcctaggccaggagggcagaggggcggatcccagctgcaccggggtgagagcctaggccaggagggcagaggggcggatgccagctgcagcggggtgagagcctaggccaggagggcagaggggcggatcccagctgcacgggggtgagagcctaggccaggagggcagaggggcggatgccagctgcagcggggtgagagcctaggccaggagggcagaggggtggatgccagctgcaccggggtgagagcctaggccaggagggcagaggggtggatccaagctgcactggggtgagagcctaggccaggagggcagaggggtggagggagtgaggggctcctgggagagtgatggggggcttgaagggatggggataacaggagaaaccccagcattggtggcagggaaaaggtgaggggcaggtaaggggacggaaaggtttgaagatggagtggtggaggcagtggggcagaaggcatgggcgctgggggaccaggtcggcctgatccgatgatgggggaaggagaggcttaattgcttgcacacgtccaaactcctcaagatgtgtacattaaatgtgcgccatttttgtatctcgatgatgcctccataaagctaaaaaataaattcctctgtccttatcggaaatgcacctggcccccgcttcggaaaatgactggccgctctctccttgcagcgtgttccgcagctgtaggcacctgtcgtcctgccttcgatggctcctccctccgtccccctggtcctcctcctcgtcctcttgctgagcctggcagagactccagcatccgcacctgcccaccgggtaacgcctccctaagttcctcggaaacaacagtgtccccaaatccctgccctctgggaagagtttttaaaaatgcttctggcttgtgtcaagggtcctggggaagaagctcaaatcctgaaaatatgagaagaaatattgcgtgtctctactaaaaacacaaaaattagccgggcatggtggcacgtgcctgtagtcccagctactcaggaggctgaggcaggagaatcgcttgaacctggcaggcggaggttgcagcgagccgagattgtgccactgcactccagcctgggtgacagagcgagactccatctcaaaaaaaaaaaaaaaaaagaagaaatggggtttcaccatgttggctaggctggtcttgaactcctgacctcctggcttcaagtgatccacccgccttggcctcccaaagtactgggatcacaggtgtcagccacggcacccagtctgggacgacactttgaaaacctttgatcacacacctccacagcatgggctgtagaggctgggttgagtttgaaatccgggatctgcgactttctagctgtgtgacttcagtcacattgcctaacctctctggtctctgagtggatcttctttgtccaattccagcactgtgagagttaacagttaactcggatggcaggcagctctcattatttagccaagaggattaaataattaagagatgttggtccagggatacacagtttcagttagacaggggaaataaactagatctctggtacagcatggtggctgttgttcataacaatgtgttgtatacttgaaaattgctaagagagtagatggatgttaggtgttctcaccacaaaaaagctaagcacatgacgtaatgtagagggtaattaccttgatggagtcactccgcagtgtagccgtatttccacacgtgttgtgcaccacgcctgcatttaaaatgcagtttttttctaacaaaaaaaaaaaaaagaggccagtcccagtggctcactcctgtaatcccagtactttgagaggccaagattagagaattgcttgagctcaggagttcgagaccagcctgggcaacatagtgagaacctccatctcttaaaaaaaaaaaattaactaggtatggtcttgcgtgactgtagtccgagctacttgggaggctgaggcatgagaattgcttgaacccaggaggctgagtttgcaatgagctgagatggtgccagtgcactccagcctgggcgaaagagcaataacccatctcaaacaaaaacaaaaacaagaaaagaaaagaaaaagaaaagaaatgctaacaacaacaacaaaaaaaaaaaaaaaaaaaaagagacgccggcttggcattcagctgccctgagttgggatagcagctctcctccaggttctggcttggtctttggcaagctatttgtttctttgagcctcctttttttctatataactaagggataacggaatccatcctatagggatgttcgaggagttttgacaagagctaatggctgtggagggttttctcagcgcttggcgttgtgtgaaacccgtgatgtgaattagctaattctaccccacaatcctttgcagttggttctattttgctacttcccaccttacacagtggaacactctggcttaaatattcagtgcacatcctccttaagagtctggaatctaccggccgggcacggtggctcacgcctgcaatcccagcactttgggaggccgaggagggcggatcacctgaggtcaggagtttgagaccagcttggccaacatggcgaaaccccctgtctctattaaaaatacaaaaattagctgggccttgtggcaggtgcctgtaagcccagctgctcaggaggctgaggcaggagaatcgcttgaatccaggaggcggaggttgcggtgagccaagatggcaccactgcgcttcagcctgggtggcagagtgagacgcgagactccatctcaaaataaataaataaataaataaagagtctgggatccacctgggtttgagtcccagctgttcttcttagtgtgttgcaatttgttgcaatttgcagaatctttctgggcctcaagagcctctttctttctttttttttttttgagacggaatttcgctctgtggcccaggctagagtgcagtggcgcaatgtcagctcactgcaagctctgcctcccaggttcacgccattctcgtgcctcagcctcccgagtagctgggactacaggcacccgccaccacgcccggct[138 bp omitted]ctactagggttgttggaggaagagcctctctttttttttttttttttctttgagacagagtctcgctctgtcacccaggctggagtgcagggatgagatcatagctcactgtagcctcaaactcctgggctaaagtgatcctcccacctacaggtgtgcgccaccatgcctggctaatttttgtattttttgttttgttttgttttattgagacggagtctcactctgttgcccaggctggagcgcagtggtgcaatccccgctcactgcaatctccacctcccaggttcaagcggttctcctgcctcagcctcccaagtagctgggattatgcccagctaattttttttatttttagtagagacgaggttggccaggctggtcttgaactcctgacctcaggtgatccgcccacctcagcctcccaaagtgctgagattacaggcgagagccaccacgcccggcctaatttttgtattttttgtagaggcgagatttcgccatgttggccaggctggccttgaactcctgttctcaagccatccttctgcttcggcctccccaaatgctgggattacagcatgagcaccacccccaggcttaacatatctttaaagtgtgcaacaccgtattgctggctgtgggcacgatgttgtgccatagagctctaggacttcttcatcctgcataactgaaattatacctgttgaagaacaattccccatttctccttccccccagcccccaataaccacctttctcctctcacaacagaacgctttaagctttctttccaggccagttggctttgtctcaggaagtcctcaatttcctcatcggtgcaatggggattgaaatgaacctgctccacaggccagtgggaaagtcgtatgacgacccacatcaccccggacctgtgggacgcctgccccgctttctgtctgcttgagtcttgatttctgcatctctatccagggacgaggaggctggaccctcaatagtgctggctaccttctgggtcccggtgagtgaggctgcgctcagctctccatccctggcccgagtctgcctggttgctgcaggcagtgagtttgtggcttgtaaagaccctcacccacattcactgaggcccatggatttatttgcagatctgtctggagggttagtctaagcagagcgatgggtgtgtggactctggagccagagccttgggcccaaatcccagctctgccccttgcttggtttgcaaccttgatctctctctctctcgctctctcactctttctttctttctttctttctttcttttttttttttttttttttttgacagagtctcgctctgttgcccaggctggagtgcaatggtgaatggtgcgatctcagctcactgcaacctccgccgcccgagtagtttaagcgattctcctccctcagcctcctgagtagctgggattataggtgcccaacagcacgcccggctaatttttgcatttttagtagagatggggtttcaccatgttggccagtctggtctcgaactcctgacctcaggtgatccacttacttttggcctcccaaaatgctgggattacaggcatgagccaccacacctggctgcaaccttgatctccctatgcctcagtttcctcatctgtgacagtgggtgtaatgatggcccttacatccgagaatgttgtgaggattgagttattaatagaacaatagctggtgtgtagtgggtgctgtataatgattagctgctattctttgtctctctctctccttttttttttttttttttttttttttgagatggagtttcgccttgttatctaggctggagtgcagtggcgccaatcttggctcacagcaacctctgcttcccggattcaagcaattctcctgcctcatcctcccaagtagctgggattacacgcatgcaccacaatgccccaccggctaattttgtatttttagtggagacggggtttctccatgttggtcagactggtcttgaactcccaacctcaggtgatccgcccgcctcagcctcccaaactgctgggattataggcgtgagccactgctcctggcaacttttttctcttttcctccatttgtctctccccatttctccagttgcatcttccctgggcaataggtgtgcccatggccacgtgctgcatagtgagcattacatccataaaataccgagattcccgtggtgctcaaggttggtttcagtttgagcttcattcagggaaacccaggctgcagagacagtgtggcaggagcagaaagaacgtgagatgtggacccagacctaggtgggttcaagccccagtcctgccattagcagcagggtaatttcgagcaagtgaccgcttgcagctgcacgatttccccaccggtaggtagggacggtcaacacgcaccccgtccgacagacttggtggaggcgctgcgtccggtgagccatgctgttgaattgatggacgatgtgtttcttcagttctacttaaccgaccacctgctcttgctctctccctccctacccagtcctccaccttccccaaatgggtgaccaagacggaaagagggagacagcccttgagatcctagacctgtggaaggccatcggtgagtgagcggggagttagacgtcttctcctgcgtcctcccctgcgggctctctcctggctttggaaactggtagatgtgagctccagccctcaccctgccgcttactatttggggggccctgggcaagtgatgcgtttccttcaagcttctgggccgtcacctggagccccagcttgctttaatgttcttttgttaccaacgtgaaattccgaatcctgtttgaaccatgggccccgtgttttctctgcatcagacctcacagaatccctccactttgaaatgacataaatggaataatcccatgatttagttgtatgactcagtgagaaaatgcacgttaatttcctagaagtgtctggcatatggtagaaatggaatggtttggctgggcatggtggctcacgcctgtcatccatactcaagcctccgagtagctgggattacaggcacctgacaccacacccagcaaattttgcatttttagtagagatggggtttcaccatgttggccaggctggtcttgaattcctgacctcaggagatctgcccccatcagtctcccaaagtgctgggatgagccgtcgcgcccggccttatttattttttaaacttttattttaggtttgggggtacatgtgcaggtttgttatataggaaaacttgtgtcacgggcgtttgttgtacagactacttcatcacccaggtactaagccgagtacccagtggttattctctctgctcctctccctcctccccctgctccaccctcgggaaggacccagtgtctcttgctcccgtctttgtgtctgtgtgttctcatcgtttagctcccacttgtaactacgaacgtgtgtgtgaatgttgtatttttgtttctagacgggctcccctactcccaccctccacagccctccaagaggaatgtgatggagacgtttgccaaaccagagattggaggtaaagccaggaaacacagaagagagacaccgacaggagagggggaacaaggaagtggcaggcagagcttagagggtaaaggaagaaaggaaggaaactggaaccaaccagggacctcctcacctgtaaccacagccactaccccgaccactcagcctcgactgtgaatccccatcctggcctcgactgctcccttcacctcgattccttcactgcgaatcccacctcatgttccaactctcatttcccagcctgaatctagcacttttgcaattaggaccccacacccaaccttgatctcccccagtatcactccctcaagcttagcctcagctacaacattgacgtcaaacctctcactttgacctcatggttcaatttcatttatttatttattttttggggatgaagttttgctcttgtcgcccaggttggagtgcaatggtgcgatcttggctgactgcaacctccaccttccgtgttcaagcgattcttctgcctc[134 bp omitted]cggcctcccaaagtgttgggattacaggcgtgagccactgcgcctggcctcatggttcaattttaacatcaacctctctcctaaataagatctttatttccagcattcattctatttttttttttcttaaggagtccctctctattgcccaggctggcgtgaagtggtgtgatcttggctcactgcaacctctgcctcctgcattcaagcgattctcctgcctcagccttctgagtagctgggattacaggcgcccgccaccacatccggctaattttggtatttttagtagagacggggttttgccatgttagccaggctggtatccaactcctgatctcaggtgatctgcccgccttggcctcccaaagtgctaggattacaggcatgagccaccacgccagggaccgttgtattgttcactgcctagcacaatgcatgacgcatagtaggtacttggtaaatatttgttaaatgaatgaattaaactatccaaacacagccttcagctgccaccttcccacccaatcatgagctcagcagatgcccaaaccccagcttgtcccaccttcctttagttggatgttcgccccaaccccatctccttcttcaatccttttttttcttttctttttctttttttttttttttttgagacggagtctcgctctgtctcccaggctggagtgcagtggcgcgatctcggctcactgcaagctctgcctcctgggttctcgccattctcctgcctc[174 bp omitted]gcccagctccttcttcaatcctaactcaattcctggagacgccatgtccttatttcaacagcactaattcatttcaaaagcatgtactggacaatactgggtatgatacgctccctgaattcactaatttccatcctcacctcgattacattctgactcttgaaaacacccaccatcaccatgtgccttcttaaaatgtgggc[138 bp omitted]catggtgaaacccaatctctactaaacatacaaaaattagctgggtggggagtgatagtgagaaaaaccattcaaagtttacctctttctttcccacagatctgggcatgctcagcatgaaaattcccaaggaggaagatgtcctgaagtcatagatgtcttcaaatccctgttcctatccttcttctccagctcctcctgctccctctgaaaccttttctaggtaccctatgctgagactaagatcctgaagttaaatacccaggtctcatgaagacattgtaaagcatttgaattattctaaaaaatttctggagtttcttaggttttattgattcatccttgaaatcagtataatgtgctattaatggaaccaatagtaattcgaggactagttgggagattctggggtaatcagggaatattcctgcaacacatttaaaggaattgtgttcttttggaatcatcccaattataacacgagctattgcataatacaaataaccctcttaagtctgagagtctgtgtctttatttgaaaagattcttcaaattgcgtacttactcctccatattctttcaacccacatgagtctcctcgagaagtgaggagaggcagtttggagcagaatggagagaataaaatgtttcttgtcaaacactccattttttcccttttaattagtctgggaatttttttaggggtagcagaatccaggatgatggggtcaggtgtgggactgggaaatccaggatgacagaatcaggtgagggactggggaaaatataacctattggaggcaatccattttggattattgttttgctgaaagttttactttcattttgggtttgaggagtcacaggaaaaagaaaccacagtgttacactgaggcaggggaatcgcttgaacccgggaggcagaggttgcagcgagccgagattgtgccattgcactccagcctgggcaacaaagtgagactcaaagtaattaatgaccaaaatgagtgactgagacactgtcagtctccatccatcgaggtttatgaaatcggctgtggggcacgtccagggaaaggtgagccacagacacctctgtggctgtttttctgaagttttcaggatatttactatttatacatttccttagacgggggcaggcatagaggcagaggggtgggtaggtggtgagctgaatggttaaattcctatcagtctttagttagtgcccagtaaatctacatttaaaaaaaatatatgtttctattttttatttatttatttattttaattttttttttttttttgagacggagtctcgctctgtcgcccaggctggaatgcagtggcgtgatatcggctcactgcaagctccgcctctcgggttcacaccattctcctgtctcagcctcccgagtagctgggactacaggcacccgacaacatgcctggctaattttttgtatttttagtagagacggggtc[133 bp omitted]gagtcttaccctgtcacccaggctggagtacagtggcgcaatctcagctcactgcaacctctgcctcccgggttcaagcaattctcttgcctcagcctcctgagtagctgggattacaggcgccttccaccatggccggtgaatttttgtatttttagtagagacagggtttcaccactttggccaggctggtcttgaacttccgacctcaagtgatccgcccgccttgggctcccaaagtgcaacgttttacataagataaagtgcatgtttgaaggcaaaaaagggcgtaaagggagtaaaggaagcaccaattacttagacatctttgggtaggtggaggaatgactgagctcatcttatctttgttccacgcctcagaagataagctagtaatggacattgtcagtgtggaataaaacagacctgagttttaggagctagacttacattgtagacctgaagttacaaagggtgagttcttgtttatgggaagtcagcaaagaatttccttatgaatgatttgcgggggcattcgtggatgcccggggcctcttccctttccgtggggatctggctgatgccaaatgccagcaactgctgtccaattggaagagggcgctgcctgactcagccaccaggctgacctctccttttgcataaggagtttggggaatcctgaggtttttcttcgcataatgaataagtattaatattgttaatacttattcattaatattgtaattaattataattattacaataaattacaataaataattaataagtaattaatattaattaattactattcatggcatggtggctcacgcctgtaatcccagcagtttgggaggtcgaggcgggaggatcacttgaggtcaggagttcgagaccagcctggccaacatggtgaaaccccatctctactaaaaatacaaaatttgctgggtgtggtgtcaggtgcctgtaatcccagctactcggaggcttgagacgtgaaaattgcttgaacccaggaggcagaggctacagtgagctgagattgtgccactgcaccccatccagcctgggtgatagaacgagactcagactaaaaaaataataataataaaaataataattatacagagtcaaatgtcggggattcaaggaggcagaaagcagatgagttctcgccctgctggagactcacgtccctgggagaagcaatcacttaaagtgattaagttaatacgagaggctgcagtgagatttttttttagacagggtctcactctattgcctgggctggagtgcagttgggagatcttggctcactgcagccttgacctcctgggttcaagtgattctcccacctgagcctgctgagtagctgggactacagacatgcaccgccatacccagctaatttttgtgttttcagtaaagatggggttttgccatgttgcccaggctggtttctaactcctgggctcaagtgatccgcctgcctgggcctcccaaagtcccgggattataggtgtgagccaccacacccagctttgcagtgaggttttgaagcagtgttatgtgatgggattcttttttcttatcaaaaaataatttactgggcaagtacggtgattcacgcttgtaatcccagcactttgggaggccaaggtgggcagatcacttgaagtcgggagttcaagaccagcctggccaacatggtgaaaccccatctctatcaaaaa[132 bp omitted]gaaatcctatctctactgaaaatacaaaactcagcctgctacagtggcaggcgcctgtaatcccagctactcgagaggctgaggcaggagaatcgcttggacccgggaggcagaggttgctatgagccgagatctgacactgcactccggcctgggtgacaaagctagactctgtctcaaaaataaataaataaataaataaataaataaataaataaataaattattgccttctaatatttttttagcagcccaagtccaatgattgcattaaaaaaatttgttgcatctatgccatgaatacaatatttaggcagtcatgtcagcttttcttttatttttctctttaggatagggccttactgtcacccagtctggagtacagtgatgcaatcatggctcactgcagcctcaacctcctgggctcaagcaatcctcccacttcagcctccccagtagcttggattacaggtgtgccatcatacccggctaatttttatttttatttttgtagagatgggggtctcactgttacccaggctggtctcgaactcctggccttaagtgatcttcctgcctcagcctcccaatgtgttgggattacaagcattagccactaggcccagccttacttctaatttttattcttatttttaatacatctccttttgtttaaggatatataccaagtgcctagaatatcagctgataagtgttccataaatgtctgtggaatatttgttagacttattattattttttgttattttttaaagttatttattttatagagacaaggtctcactcgcttgagcccaggttggtcttgaactttttctttacttatttttggggtggagtctcactgtgttgcccaggctggacttaaactcctggactcaagcaaacctcctgcctcagcctccccagtagccgggattacacatgcgtgccactgtgcttagtttttttcttatgagatattggaaaatgatgagactttgctcattggaagagaaacagcaacagacactaaaataaatctgtaagaaagcaacagacataatcaaacagaaaacaaaactcatgggggaggataaatatttattcaaacatccgggcaattcctaccaagtgctttatgtgtatatgtcatctggtaacattggagaaaaaccatcattcactgtctcttggggtggaggatgtggacctgactctggaatcactgggaggtggtttcccggtgtgttttcaggtgacgcttgaatgtccccagctgacggaaggccttttgacaggtgggacatttgtagggcttctctccggagtgggtgcgctggtgaacgttcaggttccccttgtggctgaaaactttgctgcagtatttacatttaaacggcctctccccggtgtggatcctcttgtggccctgtaaggtggactcgtgggcgaaccgcttttggcagacgtcacacatgtagggcctctcgccagtgtggactcgctggtgaactcggaggtctgagggctgcaagaagcgcttccgacagagatcacattgaaagggtctgtctcctgtgtgtgacctcctgtggatgcttagctgggaaaaatacttaaatgatttattgcacacgtcacatgcaaagggcggcagggccttggcttcttggccatctgggtgactgaccgggcccgcagggcctggggaatgaactggattgatctcagcttgtcctggggattctctgttgcccacaggtgtggcttctccttgaggctcttcttgggaaatggaggaggcatctggtttgcttcttttgggactgctcagattcagagcatctcctctgttcccgctgtgagtcaaagcttctctctccacaacgcaggcagaaggtgtgtcagcatccacattttccacagaggctcttttctggggttccttcccctcctttgctctcaccagatctggtggaagaagggattccacacacaacagttaacaaagccgattttcaatacaccaaactcattgcaaccaaacactgaccttggctgagaacttcccctcaacctcaagcctaagacattggactgtaggtctctggaaagtggaggagagattttggcagctgatcgccagccccaggggatgataatgctgggcccccagccccgcaccccagaagagagggactaacccctgtggatccaagtcttcatactcactgggactctttggaagctgaggctctggggatgacagtcctgggttctcttccctgttttccttcagatccttctccaaggtctgcttgggtctcggagagtttgggtcacctgttacgtcaatactcttgtgtagcagaaagtcctctccctgaagaggaaaaaccaagagcaatgactgccgtgtctatactggtggaagtagggacatgtctgtcccctcctgactggacacaccagacttcccatggaccaccccatcaccccaagtaaacatcaccacctcatttctgcgtctgtccctaatctgcaccctccatattctaaatcagctcctttgcctggcggttttcactgtttggttctctgagaatatttctccccgccgtgccaatgtctccctgcccctgacgctggaagaagcatgactctaggtggaggcccctaacccctggcaccattggcattggggctgcatcatcctcctggagggggcgctcctgtgcagagcagagaccccgcctccaccctctagatgctatcaacaccccaccacccctgagaatgccaaacaaaaatgtcctcagacattgccaaatgtgtccttaaaggcaaaatcaccagttgagaaacactcctcaaattaagaaatcaacagtctgagaaagtgggttccttgctgaatgacttcatgaaatgtctttgcggaaactggatggggtagggaccttcagttcattcatctgtgccaactgcctccctcacttcactgagaccatttcttacccacccccccaccctaaatgctaaaagctctcatggtggagagaaaagtagatgaggcttccctctctgtgatggctcaggaatgaatgtttggggatgtatcatgtccatggggaatggctctaatcttgtcctgtgccaaatctctcaatcagttctgcagccacacgatttcctcctgttccttctcccacctctgcccagacaccaaggcctcacacactcacctgcctcctggacagtgcagcgaccctgggcaggatctgctgctctcggcgggcctggcctgtccccggatgcatctggttcacagaggaggcccactggctggacacgtctctcggatcatctctgacactggcgggggcttcagccatctcgacatctgagttcagcataagatattctttgccgagcaagttgactatagactgtagagagaaaaaagacaatcagacactatgagaacctgaaagtagctctcatatttcctgggtcctgccataatgctcacactttactgtaattaatgttcaaatctaccttcctgatgcagaatcagctctgtggacacagcaatctgtctgaatttttttcttcactagataagtacataaatatgagtcatttagatgaaagggtctctaaccaaagagaagacaaggagaaatattctgggtgaatccaactcaattggccaatggcagctcaccttgtgttagaacttaggggctcatttggggacctggaggcagatccctgcatctgataccaaccactttccctgcctcaggatgggacttctgggccccccttcagttcactctaatgcctccttccctacgttccatcaggcctaatattttaccaatgtctttctttcaggttggcctcacacagtgtgtgggttcctgtatcccctctgcctgtccatctcctaggtcaggtatttgcaatattagctgtgctgatatttgagactggagaattctttggcccccatcccagctccccttccctgcaccaatcacgaggttcccactcacccatttcttgggtcttctgttatttcgtagcaggtcctccaggtctttgcagctctgcacaccgttcaccttgactaagacctggagctcctggggcatggagatcatgaactgctccatcaccagcatgtccaggatctgctctttggtgtggaggtcgggcctcagccacagatggcacagctcagtgagtttcctcagagcctggatggggtccgactcctctgggcagctgaacatcctgaaattcatgtgccaagtctcagggttcctgtcgtgatttccaagttgagtttctggggacgccacagaccgtggagtgtctgacccagggctgttgcagggtcctccctgaccccatgagagtgtccaatttgcagccatatctactggagaatatttcaatcagcctctgagcaagctcttccagtagccagtatcaaattgagacctatttacacaggctgcccctgtttcttctcagtaatatattcacagtttgttcagaagtctgcaggaaaaaagcatgagcccgattattttaactttctactccacacacccctcccttccaaatccctcatcccaatcctggaccccacttgtccatgggcatcggactcagccctgtggaaatgaatccactctgttcttctctgactacatgttctggggtaaaatctgaatgctcccctggattctgatctctaggggatcattgtgcagaggtggaactggttttcctttcaactggaacaacactgctcttgactgtaaattaaatcggatatgtatgtgaagctcctagaatctgatgtaacaataatgtcagttctttatgttttcccgtcaagacaagatccaaggcaaagcccttagtcataattatgtaaaaagctagagaaaaatattaatagttacaacctacgattgtccccaacacatttttcctgttaaccccaggatatttatttgctgcagg[308 bp omitted]aaaaaaaaaaaaaaaaatcctatgagaattaagctcctgcacagatatgtggttgtttcggtaaaacacacatttatgaaattcatcacttttactaagaacatgcgctatgttgtgcaaccatcaccactttctaattccagaatcactgcatcaccccaaaagagaacgccatccccatcaggaattacctcctgccccaaccccctcccccagcccctggccatcactaatctgcttattgtctctgggagtttctctgttccttatctcattccataaaatggattaaagtcttatgaaatttccaggtagtgggatcataccatagagcggttttttcttttttctttttgagacagggtcttgctctgtcatccaggctggagggaaatttgcagtcatggttccctcggcctcaacctgggctccagtgatcctcccacctcagcttcccaagtagctgggactacaagtgcatcaccacgcccggctaatttttataggttatttttgtaatagagatggggtttcgccatgttgcccaggctggtctcaaactctgggctcaagcgatgcgcttgctttggcctcccaaaattcggggattacaggcgtgattgcattgcagctggcctacatttttaaaaaattttatttttttatttatgttttttgaggtggagtttcgcactgttgcccaggctggagtgcagtggtgcaatctcagctcactgcaacctctgctgcccaggttcatatggctctccttcttcagcctaagtagctgggattacaggcccccgcccagctaatttttatatttttagtacagacagggtttcaccatgttgaacaggctggtctcaaactcctgacctcgggtgacatgcctcggcctcccaaagtgctaggattataggcgtgagccatcgcgcacagcccaatttttttttctttttaaatttggttctaaacatagcttcaaaaggcaaaagccactgtatgatactctccaggcatcaattatcacccaagttcaacagctatgagaacacagccctgctttcctagacacaggtgggggaagcaacctgaaggtctgcagaggggagaaaaaactggcaggagggtctcaggaaaggtcactggaagcctggagggcgagtaccccacacttcctggaaggactctgagcaagtgcagaacagagagacagccagggagacaatcggcagaggcgggagacaacccagaggaggagacaatatttacacaccacacatctcacagggctcctgtgcaaaacataagcaactcaaactcctccagagcgagaaaacacataacccactagaagggcttaaggcgcctgtgtggacatctcagatgaagacatgtgaatggccagcaggtctaggaaaaggtgctcgtcatcactcatcatcagggacatgcaaatccaaaccacaaggcacccctcacgcctgctagagtggctgttcccaaaaagacacatggaacgagtgttggtgaggattcgggggaaaggggtcctctgcgccctgtgctgggatgtaaattagagcagccgatatgggagacagtatagaagctcctcagaaaattgaaagtccaacaactgcatgagccggcaatcccgctccggggcaggtacacagaggaaaggaaatcaggacgtggactccaaaacagtgaagctctgaagtgacagacggtgggaaggtggaaaaactacctactgggtactatcctcatatcctgggtgacaggttcagtgatacccaaaacctcagcatcactcagtacactcacgtaacaaatctgcacaggcacccaccgaacctaaaataaaagtggaatttttttttaaagttatctatttttgtttttaaacttgcagcagtgtcttgctctgtcacccaggctggaatgcagtggtgcatcctggcttgctgcagccttgacttcttgggtccaagtgatcctcctgcctctgcttcccaaaattctgggattacgtgtgagccactatacctggcctacttaaaattatttttatttttatttcgttttattgatttattttttgagacagaatctcactctatcccccaggctgcagtgcagtggccgatctgggctcactgccacctctgcctcccgggttcaagcgattctcctgcctcagcctcccgagtagctgggattataggcgtgagccacccctctcggctaaattttgtatttttagtagagatggggtctcgccatgtaggccaggctggtctcaaactcctgaactcaagtgatccctatgcctcggcctcccagagtgctgggattacaggtgtgagccaccgcacctggccattaaaacttttttttaaaaaaataaaagaaataaagttaaataggtctactgcacagcatggtgactatagttcacagcaatgtaccgtatacttggaaattgctaagggagtcgatttcaagtgttgtccaaaaatgataagacagtgaggtagagcctatggcagtttgctcgatttagccgttgcacaatgcgtacacaccttgacacactatgctgtgcaccggacatatacaccattatatatttatatttctcaatttgaaagtaaattaggcctggtgcgatggctcactcctgtcaccccagtgctctgggaggcggaggtggcaggatcacttcagcccagcagtgaaccgcgattgtgccactgtgctccagcctgggagacacatccagcggccatctcgttttgtttatttattaagtaaatcgatacattttttaaaagcatacagatatgagaaaaggcagcctgaaattctgggaattaaagaggttttcccgccaggttccctaagcgcccctgctcagaaagcggagatcgaggctgaggcgggcagattgcttgagccgaggagttcgagaccagactgggcaaagcagcgagaccacgtctctatagtaaataaaaaaatgcactcgggcggtgtggtggtgtgctcctgcagccccagctaggtggaggccgaggagggcacatagcttgagcctgggagttccaggccagcctgggaaatgagcgagaccccgtctctgaaaaataaaatgaaacaaaacctaaccatgatgagaaagttaacattattactttatttttctcctttttttttttttgagacggagttttgctttgttacccaggctggagtgcaatggcgcgacctcggctcactgcaacctctgcctcctgggttcaaatgactctcctgactcagtctcccgaatagcgggtattaccctaacctctgcctcctgggttcaaacgactctcctgactcagtctcctgaatagcgggtattacgggcgcccgccaccacgcccggctaatttttgtatttttgttagagtcggggtttcaccatgttggtcagactggtcttgaactcctgatcccgtgatctgcccacctcggcctccagagtagctgggattacaggcgtgcgccactgggcccgaccgagaaagttaatattattcctagtttacagaagcacttcatcgccagtcagagttaatcatggggtgcaaaggagacccgctgccttcacaaagtctccgagaaaataaatgcatgagaaaataaacccaaactttctgaaaccaaccccccgcatgccagctccgaaaccccacagccatcgccgctggacactcacctccttcccggcttctgcctccgaccttctcggtctgggatgcgctctccaaccggcctggagctgaactgcgtctatttatggagaagcgggactccaggccgcgtttccggttccctgcgccgcgccgtgattggtttagggccacagagtccattttcgtaatcggcgttgattacatttcccactgaaaccccacccacaggaaattaatgtattaaacgtgcctactgtgcaaataatacaggttttcccgctctactgagttgtcatattgctgaagtatgtggaggcctcagaaaatatagatctgcaagttttaaccactttgggtcccctcatgccacagacagtaatatcctaacaagtaaaggacgtgttaagagctggttgacttcgcttattaaaacaaaacggaaaaagaaaaaaaaaagaaaaattcaaaatagagttggttgattaatatcaaaccagtgatttaatctcatttttaatctcatttgagcgaagctttcacacgcgaattccaagatgttgaaaattgtggacactcgttgatatgtaatgaatgtttgtgataattttttacttttttatttttttcaaaatcttggaattggcatgtgaaagctttgttcaaactaaactaaatcactgatttgatatcagccttatataaaagcagtgggaaccagagaaaggcacatggtccccactctgcattcattccaggacggtgatagggtggtttatagatacactgagggtcctacggggttccctagttctcagccccctcagttagggctctcaagcaagaaaagccttaacggtgggtgtgaattttactgtgtggatcatggagttaatgtggaatgataattaagtgctaggcaggattagattacaatttgggaagttcacaccatcagttggatgacactaatccattcaagtagtgactcattcattttaatttcagaggaaaccttctcgtctaacctttaggacaaattggagggctgttaattttacactgattctggtttaaatccttggaaaatcttaagccgcttcactctgggaacttcaaacttcttgtgactagaaccttcctgatgtgttgttttgaagatgcaataagactgggtcaataaagtgctcgatacaaggtcattttgccaaacagttgtgacaattattttctggtgcattttctcatactttgtgatattttcccttcttaaccactgag[143 bp omitted]cccgtctctacgaaaaatacaaaaaagtagccaggcgtggtggcaggtgcctgtagtcccagctactcgggaggctgagacaggagaatggcatgaacccgggaggcgaaacttgcagtgagcggagatcacaccactgcactccagcctgggcgacagaccgagacagcgtctcaaaaaaaaaaaaaaggaattattcactggaattaactgggagctgcctaaaccaccatcttcctatctgcttcccccgaatcctcccctctggaaactcacagtctatttctgtgaagtatgttgttggtattttggtagggatcgcattgaatctgtagatgtctattaatagtatggtctttttcacaatgttgattcttccccctacgaacatgtcttcccattttctggggtccgctttaatatttttcattagtgtttaacagttttccttgtggaaatctttcacctccttagttaaatttacttccagggttttggggtgtcttttgctcttgtaaatgagattgctttcttgatttttttcttgccactagttcgttgttggtgtataaaaacactactgatttttgcatatcgacttagtatctggccaccttactgaattggtttatcaattctaagagttttactggtggaggtttcagggattcttatagatgacatcatgttgttggcaaagagagacaattcgacttcctccttctgaatttggatgccctttgttcgttgctctggttgagactttcccaacacattattattaacgaaggtcaccaggctgaagtttggaaacaggtatatattgtgatgcaatcgccaggaccaagctagttaacatctccctcaactcacatagataccacgttctttccttcttcttatttgtttaattctcaattattgggctcaagcaatcctgcttcagcctccctagcagctaagactacaggcacgagccacatctggctttcttttgatatcgttttttttttttctttttgagatggagtctcattccatcacccaggctgcagttgcagtggtgcgatcttggctcactgcaacctctggcaggaggattgcttgacccaggaattatggacataaatagataatgaaaagaaaatagtcactatgtgagttgacgaatacattaattagcttgattgtagtgataattacaccatgaatagggatatgtaaacaccagcatggtgaccttagtcaccaaggacggatagaggccaggaattggagagcagcctgggcaacatagcgatacccccatctttacaaaaaagtttgttaattagcccagtgtggtggtgcttgcctgtaactccagatactcaggaggctggagcaggaggctctcttgagcccaggggttcaaggctgcagtgagctatgagttttccattgcacccagccaaggtgacacagtgagaccttggctctaaaaataaatcaatcaataaacaaatttatccacacaggtaggagatctctacaagaaaaactataaaatactgatgagaggaaatgaagagggcacacaaatggaaagatagtccatcttcataaatcggaagaattcacattgtgaaaatgaccacactattaaatagagatctacagatccaactcaatccctaccaaaatgtcaaggacattcctcatgagaacatgacatgtttcaagaggagaggattggagggaattgggtaggtagatggtggttttaggcagattctagttcattccacttaataactccatctgaactctgactcactatcaatacctcaattcttaacaaggaaaaacatcacagagtatgagaaaatgcatcagaaaataagtgtcagaactttttggcaaaatgaccttgtatcgggcactttactgacataatctggttttttgtttgtttgctttttgagatggagttttgctcttgttgtccaggctggagtgcaatggcatgatctcagctcactgtaacctccgcctcccgggttcaagtgattctcctgcctgagcctcccgagtaactgggattacaggcatgcgccaccacgcctggctaattttgtatttttagtagagatggggtttctccatgttggtcaggctggtctcaaactcctgaccttgtgatccacccgcctcagcctcccaaagtgctgggattataggcgggagccaccacttccggccaacataatcttatttaatcttcaaaacaacatgtcaggaaggtaataattccctggttctagtcacagggagtttgaagtttccagaattcagtgggttaagatttcctaaggattgaaaccagaatcagtataaagtgcacttaattgtcattccacatggtctccatgatccacacagtaaaattcataccaccattaaggcttttcttgcttgagaggcctaactgagggggttgagaactagggagcactcagtatgtctataaaccacctcccatcatcctaaagtgaatgcagagtggggaccatgtgccttcctctggttcccactgtttttacctaagagtaggttggctgatatcaaagcagtgatttagcctagttcaagcacagctttcccatgtcaattcccagattttgaaaagtgaaaaattatcactactactcattatgtatcaacaatgactgtccctttttttttcaatatcttgacattcacatgtgaaagctttccttaaactagagcaaatcactggtttgatattattcaaccaactcttaacatgtcctttactcattaggatattactgtctgtgccatgaggggacgcaaagtggttaaaacttgcagatctatagtccctgaagcctccaaatacttcagaaatatgaaatgtaattcagtagagcgggaaaacctatgttatttgcatggtaggcatgtttaatacattaatttcctgtgggtggggtttcattgagaaatgtaatcaatgctaatcaccttcaatggattctatggccctaaaccaatcatgtgggggcccaggggactggaagagaggcctggagtcccgggggttctctataaatagacagttcagctccagagcagttggagagcacatcctagaagagaggaggctggaggcagaagtcaggaaggaggtaagtgtccactggggatgtctgtggggttttggagttggcctgcaggggttggtttcagaaagatttggattgaggggttggtttcagaaagatttgggttggggtgttggtttcagaaagatttgggtttattttttcatgcatttgcccggacaccttgtgaaggcagtgggtctgctttgcaccctattatttattctgacttgttatataactctcccttaaaataggaataatattaactttctcatcgtggttaggctacattttattttttagagatgagatctctctcattgcccagactagactggaattcccggactcaaacgatccgcctgcctctgcttcccaagtagcaggaactacaggcacttgccaccatgcctgaataaatgtttaattttttttgtacagatggggtctcagtacattgcccaggctggtcctgaactcctgggatcaagcatgctcccatcttggtcttccaaactgttggaattacaggtgtgagccaccttgctggccacacaccacttgttaaaaagcatcgctggattctccctttccacagggtaaaatcagccattgatgaatgggcatcaacctactaggccaatgagaatctgcactaagtgtccctacctgggggtcctgtgtgctgtatactcccagaattgaatactaacccgcgtacctgcctttattttttcccatgtcccattgcttgttttaatgggaaatgaactgacagcgaatacaaagtggtttctaggaacatgaacccctttttttagagacaggctctcactatgttgcccaggtggttgtcaaactcctgggctcgagggatcctccctcctcagcctcctgagcagcagcaggtgccctgtggcaaaatcatttttaattccagaatttcaggctgccttttctctctcatatccatatgctttttcaaaaaaaaaaatttacttttaaattgaaaaacaagaaagatacgtatttatggtgtacagcataatgtgctttgcaggatagaaacaatgtaaaatgggtaaattgagctgatattcacatgccttactttatggactaatcatttttggtcatgaggatgcttaaagtctactctttaagcaatttccaattatacaatacattgttatgaactgaagtcaccatgttggacaattgctctcttgaactgatctcttcaactgaaattcatacccttaaacctatatctccccaaccctcaccatagccctgttaaccaccattctactcactgctactatgagtctactgggaatttttttttttttttttttttttttggtgacagagttttgctcttgttgcccaggctggagtgcaatggcgcgatctctgttcaccacaacctctggctcccgggttgaagtgattctcctgcctcagcttcccaagtagctgggattacaggcatgtgccaccaagcctggctaattttgtatttttagtacagacggggtttctccatgttggtcaggctggtcttgaactcccgacctcaggtgatccgcccatctcagccgtccaacgtgctgggattacaggcgtgagccaccacactcagcctgagtccactaggtttttaattattgtttacattacctacttcttttattttaaaaactattttataatttcaagttttattttaaatttggggtgtacctgtgcagatgtgttacatgagtatattgagtgatgctgaggtttgaggtatgactctacccatcacccaggatgtgaggatagcaaccaataggtagtttttcaaccctccctccctctatccctccagagtttcactgttttggagtccacgtcctgatttcctttcctctgtgtacctgccccagagcgggattgccggctcatgcagttgttggactttcaattttctgaggagcttctatactgtctcccatatcggctgctctaatttacatcccagcacagggcgcagaggacccctttcccccgaatcctcaccaacactcgttccatgtgtctttttgggaacagccactctagcaggcgtgaggggtgccttgtggtttggatttgcatgtccctgatgatgagtgatgacgagcaccttttcctagacctgctggccattcacatgtcttcatctgagatgtccacacgggcgccttaagcccctctagtgggttgttttctcgctctggaggagtttgagttgcttatgttttgcacaggagccccgtgagatgtgtggtgtgtaaatattgtctcctcctctgggttgtctcccgcctctgccgattgtctccctggctgtctctctgttctgcacttgctcaaagtccttccaggaagtgtggggcactcgccctccaggctaccagtgacttttcccaagaccctcctgccagttttttctcccctctgcagaccttcaggttgcttcccccacctgtgtctaggaaagcagggctgtgttctcatagctgttgaacttgggtgataattgatgcctggagagtattactcagtggctcttgcctaatgaagctaggtttaggaattaatttttaaaaatcttattattgtatcaacccacttctttaaaatatcaaagagcactagactttaaatccattttctgagatgagattaggaatagagaaacccttagagacagaaggtagattagtgattgccaggggctggggtgggtgggcaggcggtgatcactgatgaggatggggttccttttagggtgatgagataattctggagctagaaactagacagtggtaatggttgcacaacatggtgcatgtcttagtcccatgaaattgttcacctgaagagggtaaaaatgatgaaattatgaatgtgcatttcaccaaaataacaaaatatctgtgtaggagcttaatcctcataggattctttagtgctgtcccttctctggagcgaataattctgggattaagagggtttgttgtgggacaatatcttacgttgtaactatttttatttgtcttattgcataattatgactaaggatttgccttggatcttatcttgataagaaaacataaagaattgacatgattgttatatcagattttaggcgcttcacattcctgtcctattttatttacagtcaaaaacaatgttgttcgatgggcaggaaaaccaattcagcctttgcacaatgatcccctagagatcagaatccaggggagtattcagattttactccagaacatgtggtcaggtgtagacactggaagaataacagagtggattgatttccacggtgctgagtccaatgctagaggggaagtggggtctgggattgggatgagggatttggaaggatggggtgggtagagtagaaactttaacagagctcatgctttttttccctgcagacttctgaatgaacagtgaatctattactgagaaaaaccaggggtggcctgtgtatataggtcgcaattagacaccggcttctggaagagctttcccagagacagattgaaatattccccagtagacatggctgcaaattgcacatcctcatggagtctaggagaatcctgcaacagccctgggtcagagccaccacagtccatgccatccccagcaactcaacttggaaatcatgacagtgatcctgagacttgtcacgtgaacttcaggatgttcagctgcccgaaggagtcggaccccatccaggctctgaggaaactcactgagctgtgccatctgtggctgaggcccgacctccacaccaaagagcagatcctggacatgctggtgatggagcagttcatgatctccatgccccaggagctccaggtcttagtcatgatgaacggtgtgcagagctgcaaagacctggaggacctgctacgaaataacagaagacccaagaaatgggtgagtgggaccctcgtgattggtgcagggaaggggagctgggatgggggctgcatggtgcagctggactcgagaggacccgaggggctgctctaggtcagggcttccaagtagaggagagtttgcccatcagggacacatggcagtgtctggggacagtttttattgtcacaagggggaggacaggagacgctgctaagcattctccaaagctcaggacaacccatcatgacaaataatcttccagattccaatatcagctgtgctgagacggcaagttcctggtgtaggagatggacaggcagagggggtacagggacccacacactgtgtgaggccaacatgaaagaaagacattggtgaaatattaggcctgatggaatgtagggaaggaggcattagagtgaactgaaggggggcccagaaataccatcctgaggcagggaaagtggctggtatcagagattcagggatctgcctccaggtccgcacatgagcccgccatcagccaattgagttggattcacccagaatatttctccctcttttctctttggtttagagaccctttcatctaaaggactcatatttatatacttatctagaaaagaaaaaagttcacacagagctgattctgcatcgggaaggcagatttgaacattaattacagtaaagtgtgagcattatggcaggacccagggaatatgagagctactttcaggttctcatagttagtctgattgctttttttctctctatagtctgtagtcagttttcttggcaaggaatatcttatgcaggaatcagatgtggagatggctgaagcccccgccagtgtcagagatgatccgagacacgtgtccagccagcggacctcctctgtgaaccagatgtgtccggaggaaggccaggccagccaagagctgcagaccctgcccagggtccctgcactgttcaggaggcaggtgggtgtgtgaggccttggtgtctgggcagaggtgggagaaggaacgggaggaaatcgtgtggccactggactgattgagagatttggcacaggacaagattacagccattccccatggacatggtacatccccaaacattcattcctgagccatcacagagagggaagcttcatctacttttctctccaccatgagagcttttagcatgtagggtggggggtaagaaatggtctcggtgaaataacggaggcagttggcacagatgaatgaactgaaggtcccatccccatccagtttcctcaaagacatttaatgtaataattcagcagggaactcacctcctacagattgtcaatttcttaatttgaggagtgtttctcaactggggtgattctgcctttccggacacatggccatgtctagagacatttttgttgtcattgtagggggtggtggggtgttgatagcatctagagggtggaggcggggtctctgctctgcacaggagcgccccctccaggagggtgatgcagccccaatgccagtggtgccaggggttaggggcctccacctagagtcatgctccttccagcgtcaggggcaaggagatgctggcacagcggggagaaatatgcccagagaaccaaacagtgaaaaccaccacacctgtgtcattagaagagttggtgcatccagtcaggaaaaagcagacatgtccttccaccggtttaggcatggcagtcattgctgttggttttccattctcaggaagaggacttcctgctgccagagactactgtcatgaaaggtgacccaaaggctctgagacccaagccgaccttggagaaggacctggaggaagacagggaggagaacccaggacttacatccccagagcctcagcttccaaacagtcccagtaagtatgaagacttacacctgtgtggagatagcccctctcttctggggtgtggggctggggtcccagcattatcatgtctgggggagttggcactcagctgccaaagcctctccatcccttactctccagagacctacagtccaatgtcttaggtttaaggttgaggggaagttgtcagccaacatcagtgtttggttgcaatgagtttggtgtattgaaaatgcaccttattaactgtgtgtgtggaatcccttcttccagcaggggtggtgggagcaaaggaggggaaggaaccccaaaaaagagcctctgtggaaaatgtggatgctgacacaccttctgcctgcgttgtggagagagaagcttcgactcacagcgggagcagaggagacgctctgaatctgagaggtctcaaaagaagcaaaccagacgccacctccatttcccaagaagagcctcaaggagaagccacacctgtgggcaacagagaatccccgggacaagctgagatcaatccagttcattccccaggccctgcgggcccagtcagtcaccccagtggccaagaagtcaaggaactgctgccctttgcatgtgaggtgtgcggcaagaggtttaagtatcgcggcaagttagccgtccacacgagatcacacacaggcgagagactctttcagtgtaatctctgcgggaagcgcttcatgcagcgcataggcctgcaatttcaccagcgaacccacactggcgagaggccctacacgtgtgacatctgccagaagcagttcacccagaagtcctacttgaagtgtcacaagagaagccacacaggggagaagcccttcgaatgtaaagactgcaagaaagttttcacctacaaggcaaatctgaaggagcaccagcgcatccactctggagagaaaccccacaaatgttccaagtgtccaagagccttcggtcggccggcgaccttaagacgccaccagaaaacacatcgagaagccacttcacagtgacttcaccatcgggtctgtcttctgcaccaagaaagtgtgaatgaagatttttcaccgatgttgtcagatgacgtttgacagatgaagggcgcctggcacgcagaggagtgccctagataggaattcctaggatgtttgtttaaatctttttcctccccgggggaattttggtttttgtttcattatttctattgttttaggtttattttggtttgtgttgctgttctttcaataaacatcttattagttttcaatattttgtaacaaaaaacagtctcctgattgacatgctgttgttatgcactgttttgctataaagtacaattgtccaaggagggtgtccggattaaatacacgatatgcctcgggaaatctgggtttcagataaacgttttttgtttttttagtatcagcttgttctaaattattcattatttatctgaaactcagcttttattaggtatcctaaatagttttcttttttatttttttttctattcttttttttgagatggggtctccctctgtcaaccaggctggattgcagtagcaggatcatcgcccactgcagcctcgaccttccaggctcaggcagtccttccgtctaagcctcccaagtagctgggactacaggatcataccaccacttcggccaatttttgtgtttttttgtggagatgaagatttgccttgttgcccaggctggtcttgaactcagaagtacaagtggtccaactgcctcagcctccttaagtgctggcattacaggcatgagccgctgtgccctgtattgtttttattagactttattataattatgatattcaaatttttggaaataattttttgtagtgatgggattttttgttgcccaggctggtgtggggtgagccaccacgcctggctaacgactttctttttcagagctgtcttaggttcacagggaaattcagtggacagcgcagagtccccgtagactcccaccccacacagcacagcccctccccgcccagcatccccagcagagcggtgcacctgttccatcagtgagcctgcctggacatatcaccaccacccagagtccatggtgttcattagggctcgctctgggtgttgtacatcctgtgggtttggacaaaggcctcatgagtacccaccactggagtattgtggggggggtattttcactgccccccccgaatcctctctgctctgcctatttatctccccgccccagatggtgtattttgtggcctaaatttggcaacctctaaattcctgatttgactcttgaactacggaggcattgggagtctctggtgactagttggtcttagtgatagtaccatcccctgaagcctttgttgatccagagatgggtggaccccaaactcagagcttctgatttagtaggccgggggtggggcctgagagtgtgcattaaaacagaattcgtaggccgggtgcggtggctctcgcctgtaatcccagcactttgggaggctgaggtgggcagatcacttgaagtcaggagttcaaaaccagcctggccaacatggcaaaaccccatctctactaaaatacaaaaattagccaggcgcagtggcacgtgcctgtagtcccagctacttgggaggctgaggcaggagaattgcttcagcccgggaggcagaagttgcagtgagccaagtttgtgccactgcactccagcctgggcaacagagccagactcagtctcaaaattaaaaaaaaaaaaagaatttgttttagaatagctttctaaagtccattgagctccctactgtccccacaccatttcctctattattttttgtttgtttgtttgtttgtttgttttgagatggagtctcactcagtcacccaggctggattgcagaggcacgatcttggctcactgcaacttccacctcctgtgttcaagcgattctcctacctcagcctcccatgtactgggactacaggcatgtgccaccacacccagctaatttttgtatttttttagtagagatgcggtttcaccacgttacccaagctggtctcgaattcctgacctcaagtcatccgcccatctgggcctcccaaagagctgggattacaggtgtgagccactgcgcctggcctcccctattgttaacatggtacgttagtatggcacatttgccacaagcgatgaactgactggatatattgccgtgatctaaggcccataccttattgaggcctccttagtgtttacacaatgacctcctcttccttcctccccatccaggatgccacattgccttgagttgtcacgtctccctaggatcctcttggtgacaatttcttagattttacttgtttgggatcacctgagaatgtgcattttaggtggtgctgatgctgctggtcttgggagaacattttatggatgagctgacaggcagagtcctgcagtctgcagaggtctggaaaggtcccttcccgaataggctggattcatttattaaaggccacttttgtaagactttggttcttgtcatcttaatttaaaggaaatttatcaagagacacacagcaaagagatgcatcatagagtaactattgcaaaggaaatagagtattttgaaagttaagggcagaatagacaggacatcctgggagcaaggattcagggccaactgctcctaaggatgagacagcaaagacccgctagagggagactcccctttatgggagtctcggatcattacacaagggggtgggaagaggtgttactagtaagcatgttctgggtggtcccctgggcacacaggtgcagtagctgtgcacacgtctctttagcatcttaagtctccacccaggggtgtgttttttactattataacgagcaaagggtcagtttgtgaacaggtaaaatcacaatgctcatgttctctacagggaaaactcccttttgtagatggttttgtgtgaatgaactcaattagaaagtgaaggctggggctgattgtgttggctgtacggtccccatgggtgctgcgtttggaggacatggtcaccttcttgactacctatcctgactcacccaggtccatttaggagaaagagtccttgaggtagaaacctgaatccgccatcaaatgtacacagactcccgtttaattcaagaagtggatgtttggtgggtagtggttctccatttagatattgggtccaacatccttctccagacacagaaaatgtgttgatgataccacctgcccacttaatttaaatcatgtttctctatgatccattaaccacatccgacatttctttagagcttcatttcccaattttcctacatgttggactcacttgaggtgttttttcaatatttttttaaaaagcaatgcctggggtccagccccaaggtaatgatgtgattggttgaggatgtggcccctgtgttgagagtttataaaactcctcaggtgatcaaatgtgtggctgagtctggcaggtcggttttctgattgtctggtcactccaattcctgttctctcatggggatcagtgagttcatttccacggagagtcatgcacctccattcccagtctaaagaaggtagactccacagctggctcccacccaccctgcacgggggtccctcccactgtggctggctacatgcaccactccagggactgcccctcatggctctgggcacatgtggcactgggtggcctttgcactgctgctccttatccacctatgtgctctgagccaagagcttgatttacctgatgtgacaatgaaaacaggatacccactgcaacctcaaaaaagcccagtgcggctgggcgcagtggctcatgcctgtaatcctagtattttgggaggccgaggtgggtggatcacctgaggtcaggagtttgagaccagactggccaacatggtgaaaccccatttctactaaaaataaaaattagctgagcatggtggtgcacgcctgtaatcccagcattgcattccagcctcggtgacagggcaagactcagtctcaaaaaaagcgccatgctagggatgactgaattgaatttagaaggtgcccttgctttcagaaaaacaacaacccaacactgcttaatctacccaacccggagccaaatctgcaccaaccaaccacctggcccacctggtggcttttcagactctgaccttgacgatgggacatgaggtggggaaggaggtggaagcacagctagggaagaaggggcaagagacccactcccctggcatgatccctggggtcttggaggctgggccggtcaacatggctgcagttatttctagctttctggattcccagaaaaaaacagctgtacttcaaagaaaatgcagaacaaggtgaggtcgacgtggaaaatcatcccaacatcagccaaacggaactgggctctgctatccgagtgcactcaggccaaacacccacgtgaagcttttacagtgagagaaaggaagacatttatttgcagggcaccaagcaaggagaatcgggcagctaatgtttaagacctgaactccccccatggcttaggagtaagggtttttttttttgtttttttgtttttttttgttttgtttttgagacggagtctcgctctgttgcccaggctggactgcagtggcacgatctccgctcactgcaagctccgccccccgggttcatgccattgtcctgcctcagcctcctgagtagctgggactacaggcgccatttttatgtataaatttataaagttaatattgataatgacagacagaaaataatgccttctctaagaatgtgtgaccaaccaccatccttccctcatggggatgtggagtttcccttgtcttggatgcctaacagagctgtcaatcaccacacatcctagaccgaccacatctttccccacctcacgtaagggtggctccagcccccttgatgtgcaatccacaagatttgtggggttatccttgattcctgcatttccctcacatgacacactcagtctctcaacaaatcctataccttaattaatgtgtttactgacatgaatttcacgcgacataaaattaactgttttatctgtacagtttagtggcatttggtgcatttacactgctgtgcggcagctcctctagctggttcctgtgcctgcatgtccagagtccaagttctgacatttgtacatactcatgaagtcattgccgtcatcaagaagctgaacatccccaccatcctccaacgcttccccaggctcttcatcatctgtccctcccacaactccatccctggacaaccactggtgttctctgtgtcattacagatcactgacagaatttccttatttttgccttttttttcttttttctttctttttctttttttttttttttgagacagtgtcttgctctgttgcccaggctggagtgcagtggcacaatcatagcgcactgtagcctcagcttctcaggcttaactgatcctcccacatcaccctcccaagtcgctgggaccacaggcacacatcaccatgctcggctaattgtttctatttttttgtagagctggggtctcactatgttgcccaggctgatcctgaactcctgggctcaagcgatctgcctgcctgggcctcccaaaaagtgctgggattacatgcatgagccagtgtgcccagcctaggggtagaattttctagcgatggaatcataccttatgtactccttttctatctgccctccttcaccttcataattattttgaaattcactcatgttcttgggtgtaatcaatgattcctttttactgctgagtagtattctcaacttcattgaattgtaccctttgcatatgtgtgatttattgtatatcaactatacctcagtaaaactatacgaaaaagataaggggttctctgttttttgttttgttttgtttttgagatggattctcactctgtcgccaggctggagtgcagcagcatgatctcggctcactgcaacctctgcctcccgggttcaagcaattctcctgcctc[135 bp omitted]ccgcccaaagcgctgggattacaggcgtgagccaccatgcctggccaggattttcttaaaacttaaaaacaaattcagcatttgaccagttctccccatttcaactttcagtattcatggtcaagccaacagccatcaacctggatgactctgttgccatcctcactgagctcctggttccttcccttcccctatatgggctgttatcttttttctcttttttcttattttgttctttttttttttttttttttgagacagggtcttgctctgtcacccaggcttgagtgcagtgacacaatcataatgccctgcagcctcaacctctcaggctcaaacaatcctcccacctcagcctccccagtacctgagactacaggtgtgcacaaccaggccttacaatttttttttttttgtatattttgtagagatggggtttcatcatgttgcccaggctggtctttaactcctgaacccaagctatccacctgcctcagcttctcacagtgctgagattacaggcatgagccaccgcggttggctgtatgggctattttcaaggcatcttctgagaaaacgctaaagagaagtcagaaagctactctatgaaggcagaggcattcgttggagctctgagtgatgtacctgcaatgtctagattctagttttaggagtcggcagagtcagcccaattctatgtgtcagaccaattcaatgactgaaatagtggcagctccacctactagtacaatgggtcaagttttcacatttcacttgttcctacaggatggggcctggcaggcttgagttgagatttatgcttgtttctatgtagctttggatcgttgtgaaagccaggtcatttcaatcattttgtgcaaacatcattgtgtgtaaaaacggtgtccacgttttgtctttgaaatggtccccgccctccgctcgttatcgtgttgagaatgaaatgagaggacatgcttggcacctggagatgattggatattacagctgtgcgccataagggcaaatggttccattgtttgatgagccgtcctggcggtgggtgggtcggtcacttctaaacagataaggaatggctagaaagctcttgtaccaaaccagcttgaagcaacctcacccacaccgaatccctccacgtttcttttcttttttctttcttcctttttttttttttttttttttttttttttgagatagagtctcgctctgtcgcccgggctggagggccgtggtgcgacctcgggtcactgcaagctccgccccccgggttcaagcaattctcctgcctcagcctccggagtagccgggattacaggcacccgccaccatgcccggctaatttgtgtattttagtagagacagggagggtttcactgtattgtccaggctggtcttgaactcctgagctcaggcaatgcgcccgcctcggcctcccaaagtgataggattacgggcgtgagccaccgtgcccagcaaatccgtctacttttcttttttctttctttctttcttttctttcttttctcccaacccccctccccccgtcaaacaaccaacagttttttaacacagaaagtaaggcataatccagggcttggactgtctttcaagaaaaccccaaacccgctgccaggaagtcacagccactaagtcccatcccaggcccagttgctgccaggaaacacaccgcgtggagacccagcatgactgctgactgattgcaagtccccaggagggctttatttttgcttttcaacatcctgttctgcaggttccttggctctttttgcccgtatgccgaagagccgggcattgggacgggccatgcggagactagcgaaggctttgaaattcttctcctcgatgatgactccagctttctccttctaggcattccggttgggcatgaccggtcctgtcagccgagcggccagtttcagttcttcagcagaactgtctcccttctcggaggccgagggcttcccggggaagcggatgcgtttggagcggggctccttcagccgccgcacgttggcctgcagggactgcgcctcctcggatccgcagaaatgccggcgtccgggcccccttcttcgcgtgccggccaccctgagctcctccaggcggaggccgcggccgtgcgcaccttcgtgtggtaccgaaccgtggggcagcgcacgatgggccggatgggccccgacgcggggcaggggcgaggcggcgcgccttggcttgcccggcctggcgcctgcggatcttctgggccggctggttgaaccgcttggccacgcgccgctgcagtccttggggaagcggggcttcgagatcgtgccgttccggctgggcgccgtggctgcctacggccctgcggctgcagaccagaggggagccaccgaggggaaggtccctgcgcgcgcgcaccccatccccggcctccgcctctaacctcccagcctgggccggaggccgcccctagagcccgggccccggtccaatgctgtctgcgaagaaggggcccatccatgcccgcgttggcggcagcgccaggccgatggcgctggatggagcccgaaggccgagaccccaaatccctctgcttttctaagaaatcgccctccagtctttttttttttttcagatctgtaacttgttttcacccctgatttaaaacaataccactgttctcccccaaattttcctttgatacagtaggtgaacaaaatagatttttttccccacaaatatcagcagacacttcttggcaccccacactgtattggcatgggtgttaacagtcccagttcaggtgtgcagcctttcaggtggatgcactgtaacaaggatgtaaatgcggagccatcctaagaatcacattcagtcatggggttgcccttccaagctggcagaaaaggaacccgggccaggcacc[184 bp omitted]gaggcaggagaatggcatgaacccgggaggcggagcttgcagtgagccgagatcgcgccactgcactccagcctgggcaacagagcaagactctgtctcaaaaaaaaagaaaaaaaaaaaaaagaaaatcgacctgccagactcagccacacgttagatcacctgcggagttttataaactctcaacacaggggccacatcctcagccaatcacatcattaccttagggctggaccccaggcattgcttttaaaaaaaatattaaaaactcctcaagtgactccaacatgtagccaaattagaaaatgaagctctaaagaaacattggatgtcattaatggatcatagagcaccatgattgaaattaaacgggcaggtggtattatcaacacattttctacgtctgtgaagaaggttggacccaatcaccaaaagggagaaccaccacccacccctacctccacttcttgaatgaaaggggagtctatgtacattttatggtggattccaggtccctgcctcaaagaatgctactccgaaacggacctgggtgaggcaggataggcagtcaaggaaatgaccacgtcctcaggatgctgcacgcgtggtgactgtacagtcaacacagtaagcctcagcgttcacattggaattgagttcattcaagcaaggccatctccagtagggtatttccactgtagtatttccactgtagagagaatgtgcacgttgatcttacccatccacaaaccgacacatttcttgttatgatagtaaaaaacacacacctgggcgggcagttaagacgctaatgagacatgtgcacagctactgcacctgtgtgcccagaagagcacccagaatatgcttagtagtaacacctcttcccacccccctaggtgtaatcatccaagactcccataaaggggagtctccctcaagcaggtctttgctgtctcatccttgggagcagctggccctgaatccttgctcccaggatgtcctgtctattctgcccttaactttcaagatattgtatttcctctgtaatcaattattctatgatgcatctctctgctgtgggtctcttgattaaattcctttaaattaagatgacaagaaccaaagtcttacaaaagtagtctttaataaatgaatccagcctatttgggaagggacctttccagacctctgcagattgcaggactctgcccgtcagctcaatcagccatccataaaatgtcctcccaagaccagcagcatgagcaccacctaaaatgtacattctcaggtaatcccaaacaagtaaaatctgagaaattgtcaccaagaggatcctagggagacgtgacaactcaaggcaatgtggtgtcttggatggggaggaaggaagaggagggcattgtgtaaacactaaggaggcctcaataaggtatgggccttagatcacggcaatatatccagtcagttcatcgctccagtcagttcaaaggtgccatcctaatgaaccatgttggcaatgggggaagccatgtggggcattagggagctccatggactttagaaagctattctaaaatgaattatatattttaatgcacactctcaggccccatgcccggtctgctcaatcagaagctgagtctggggcccacccacctgaggattaaccacgccttcaggggatggtagtatcactaagaccaactagtcaccagagactcccaatgcctctgtagttcaagagtcaaatcgggaatttagaggttgccaaatttaggccacaaaatacaccatctggggcagggagataaatatgcagagcagagaggattccgggggcagtgaaaataccccccaggatactccagtggtgtgtactcatgaggcctttgtccaaacccacagcacgtacaacacccagagcgagccctaatgaacactatggactctgggtggtggtgatatgtccaggcagcctcactgatggaacaggtgcaccactctgctggggatgctgggcagggagaggctgtgttgtgtgaggagggagtctaggggaactctgtgctgtccactgaatttccctgtgaacctaaacagctctgaaaaagaaagtctagagccaggcgtggtggctcaccccacaccagcctgggcaacaagaaatcccatcactacaaaaaattatttcaaaaatttgaatatcataattataataaagtctaataaaaacaatacagggcacagcggctcatgcctgtaatgccagcacttaaggaggccgaggcagttggatcacttgtacttcggagttcaagaccagcctgggcaacatatcaaaattccatctctacaaaaaccacaaaaattagccaagttggtggcgtgctcctgtagtctcggctgctcgggaggcttagatgggaggattgcttgagcctggaaggtcgcggctgcagtgagcggtgattatgccactgaacctcagcctgcgtgacagagggagacgccatctcaaaaaaaaaaaaaaagaaagaaagaaaaaagaaaacgaaaactctacaggatacccaataaaagctgagtttcagataaataaataatttagaacatgctgatactaaagaaaattgtttatctgaaactcaaatttcatcaggcattatgtattttatatggccaccctccttggacaactgtactttacagcaaaacagtgggtaaccccatgtcaatcaggaaactcagttttccgttatacaatattgaaaactaataagatgatcgtttattggaagaacagcaacacaaaccaaaataaacctataagaaaacaatggacataatgaaacagaaaacaaagctcagtggggaggacacatatttactcaaacatcctggcaattcatatctagggcactccctctgtgtgtcagacgcccttgcatgtgtcaaatgtcatctgataacattgatgaaaaatatcattcacttcttcttggtgcagaaggcatagaccggattatgcaatcactgagaagtagcttctggatgtgttttctggtggcgtcttaacaatttcagccgactgaaggctcttggacacttggaacatttgtagggtttctctccggagtggatgcgctggtgctccttcaggctccccctgtaggtgaaaactttcttgcagtctttacattcgaagggcttctcccctgtgtggcttctcttgtgacacttcaagtaggacttctgggtgaactgcttctggcagacgtcacacgtgtagggcctctcgccagtgtgggttcgctggtgaaattggaggctaataagctgcatgaagcgcttcccacagagattacattgaaagagtctctcgcctgtgtgtgatctcttgtggatgactagcttggaattacacgtaaacctcttctcgcacacgtcacatgcaaagggcggcagtgccttggcttcttggccatccgggtgactgactgggctcgcagggcctggggaatgaattgaattcatcccagcttgtcccggggattctctgttgcccacaggtgtggcttctccttgaggctcttcttgggaaatggaggaggcatctggtttgcttcttttgggactgctcagattcagagcgtctcctctgttcccgctgtgagtcgaagcttctctctccacaacgcaggcagaaggtgtgtcagcatccacattttccacagaggctatttttggggggtccttcccctcctttgctctcaccagatctgctggaagaagggattccacacacacagttaataaagcgcattttcaatacaccaaactcattgcaaccaaacactgatgttggctgacaacttccgctcaagctcaagcctaagacattggactgtaggtctctggaaagtagaggatggggaggctttgacagctgagtgccaactcccccaggggatgataatgctgggcccccagccccgcaccccagaagagagggactaacccctgtggatccaagtcttcatactcactgggactctttggaagctgaggctctggggatgtcagtcctgggttctcttccctgttttccttcagatccttctccaaggtctgcttgggtctcagagactttgggtcacctgttacgtcaatactcttgtgtagcagaaagtcctctccctgaagaggaaaaaccaagagtaatgactgctgtgtccaaactggtggaagcagggacacatctgtccccttctgattggatgcaacaactcttctaatgacacaggtgtggaaatacgtgcagacttcccctggaccaccccatcaccccacgtaaacatcaccatctcatttctgtgtctgtccctaatctgcaccctccatattccaaatcagctcctgtgcctggtggttttcactgtttggttctctgagcatatttctccccgccgtgccaacgtctccctgcacctgacactggaaggagcatgactctagtcgaggcccctcagctgtggcaccactggcattggggctgcatcaccctgctggagggggcgctcctgtgcagagcagagaccccacctccaccctctagatgctattaacaccccaccatcccctacaatgacacacaaaagcatctccagacatggccatgtgtccggaaaggcagaatcaccccagttgagaaacactcctcaaattaagaaattgacaatctgtagaaaatggtttccttgctgaattattacattaaatgtctttgaggaaactggctacggggaaggaatcttcattcatctgtgcaaactgcctccctcatttcactgagatcatttcttatgccccaccctaaatgctaaaagctctcatggtggagagaaaagtagatgaggcttccctctctgtgatggctcaggaatgaatgtttggggatgtatcatgtccatggggaatggctctaatcttgtcctgtgtcaaatctctcaatcagtccagcggccacacgatttcctcctgttccttctcccacctctgcccagacaccaaggcctcacacactcacctgcctcctggacaatgcagggaccctgggcaggatctgcagctctcggtgggcctggccttcccctggacgcatctggttcaccgaggaggcccgttggctggacacgtctttcagatcatctctgacactggagggggcttcagccatctcgatatctgagtcctgcacaatatattcctttccgtggaaggtgaccacagactgtagagagaaaaaagacaatcagactcaccatgagaacctgaaagtagctctcatattccctgggtcctgccataatgctcacactttactgtaattaatgttcaaatctgccttcccaatagagagtcagctctgtggacacagcaatcctgtctgaattttttcctctctagactccagcacctgcctgcgcctggaatattctagttaagtacataaacatgggtcctttagatgaaatagtctctaaaccaaagagaagacaaggagaaatattctgggtgaatccaactcaattggccgatggcagctcaccttgtattagaacttaggggctcatttggggacctgggggcagatccctgcatctgataccaaccactttccctgcttcaggatgggactcctgggccccccttcagttcactctaatgcctccttccctacattccatcaggcctaatatttcaccaatgtctttctttcatgttggcctcacacagtgtgtgggtccctgtaccccctctgcctgtccatctcctacaccaggaacttgccgtctcagcacagctgatattggaatctggatgattatttgtcatgatgggttgtcctgagcgttagagaacgcttagcagcgtctcctgtcctccctgacaacaaaaactgtccccagacactgccatgtgtccccgacgggcaaactctcctctacttggaagccctgacctagagcagcccctcgggtcctctcgagtccagctgcaccgtgcagcccccatcccagctccccttccctgcaccaatcacgagggtcccactcacccatttcttgggtcttctgttatttcgtagcaggtcctccaggtctttgcagctctgcacaccgttcatcatgactaagacctggagctcctggggcatggagatcatgaactgctccatcaccagcatgtccaggatctgctctttggtgtggaggtcgggcctcagccacagatggcacagctcagtgagtttcctcagagcctggatggggtccgactccttcgggcagctgaacatcctgaagttcacgtgagaaatctcagggtccacgtcgtgatttccaagttgagtttctgaggatgccatagaccgtggcagctccaacccaggtctgttgcaggattctcctagactccatgaggatgtgcaatttgcagccatatctagtggagaattttttaatcagtctctgagaaagctcttccagtagctggtatctaattgatacctatctacacaggcttcctctggttttcctcagtaatagattcactgttcattcagaagtctgggggggaaaagtatgagcctcattagtttaagttactactccatccatccctcccttcgaaatccctcatcctggatgccacttcttcagcagcatcgaattcagcacagtggaaatcttccagtgtctatacctgactacatactctggtttaaaatcttaatgacccctggattctgatctctaggaaatcactgtgcagaggctgaatcagttttcctgtcaattggaacaacattgttcttgactataaattaaataagatagttaggtgaagctctgaaaatgtgatgcaacaataaagtaagccctttatgtttccccatcaggacaagatccaaggcaaagcccttagtcataattatgcaaaaggatagagaaaaagagttagaatgtaatattttccccaacacatattcttgttaactccagaacatttacttgctccagggaagggacagcattaaaggatcctatgaggattaagcacctacacagatattttgttattttggtaaaatgtacattcataaatttcatcattttttactctcttcaagttcacgattttatgggactaagacatgcaccatgttgtacaaccattaccactgtttacttccagaattatctcatcaacccaaaagcaaccccatccccatcagtgatcaccccctgcccacccaccccagcccctagcaatcactaatctaccttctgtctctaagggtttctgtattcctaatctcatctcagaaaatggatttaaagtctagtgctctttgatattttaaagaagtgggttgatacaataataagatttttaaaaattaattcctaaacctagcttcattaggcaggagccactgagtgatactctccaggcatcaattatcgtccaagttcaacagctatgagaacacagccctgctttcctagacacaggtgggggaagcaacctgaaggtctgcagaggggagaaaaaactggcagaagggtcttgggaaaagtcactggtagcctggagggcgagtgccccacacttcctggaaggactttgagcaagtgcagaacagagagacagccagggagacaatcggcagaggcgggagacaacccagaggaggagacaatatttacacaccacacatctcacggggctcctgtgcaaaacataagcaactcaaactcctccagagcgagaaaacacataacccactagaagggcttaaggcgcctgtgtggacatctcagatgaagacatgtgaatggccagcaggtctaggaaaaggtgctcattatcactcatcatcagggacatgcaaatccaaaccacaaggcacccctcacgcctgctagagtggctgttcccaaaaagacacatggaacgagtgttggtgaggatttgggggaaaggggtcctctgcgccctgtgctgggatgtaaattagagcagccgatatgggagacagtatagaagctcctcagaaaattgaaagtccaacaactgcatgatccggcaatcccgctccggggcaggtacacagaggaaaggaaatcaggacgtggactccaaaacagtgaaactctggagggatagagggagggagggttgaaaaactacctattgggtactatcctcatatcctgggtgatgggtagagtcatacctcacacctcagcatcactcaatatactcatgcaacaaatctgcacaggtacccactgaatctaaaacacaagttcaaattacaaaaaaaaatttaaaaagaagtaaataacataaataataattaaaaacccagtggaactcatagtagtagtgagtagaatagttaccagggctggggtaggggttgggaagatataggtcaaagagtacaaatttcaattgaagaaatcaattcaaaagagcaattgtccaacatggtgacttcagttcataacaatgtattgtatacttggaaactgcttaaaaaaaattagatttcaagtattctcaaaaccaaaaatggttagtacatgaggtagggcatatgaatattagctcaatttagccatttaacaatgtttgtaatactacaaagcatattatgctatatgccataaatatatacaatttttagttttcaattagaagcaaattaatttttattgaaaaagcacacagatatgatagagaaaagggagcctgaaattctggaattaaaagtggttttgccagagggcgcctgctgctgctcaggaggcagaggcggaggtgggaggatcacttgagcccaagtgtttgataacagcctgggcaacatagtgagatcctgtctctaaaaaagaaagtggtttcatgttcctagaaatcactttgtatttgatcttagttcattccccgttaaagtaagaaacaagacacaggaaaaaataaaggcagacacaggagttagtattcaattctgggagtatataccacacgggtcacccaggtagggacacttagctcagattctcattggcctagtaggttgatgctcattcatcaatgatttgatttcaccctgtgcaaagggaaaatccagcaatgctttttaaaaagggtgtgtggcaggcaaagtggctcaggcctgtaattctaacaggttggaagaccgacatgggaacatgctagagcccaggagttcaggaccagcctgagcaatataccgagaccccatctctgcaaaaaaaaaattaaaaatttatccagtcgttgtggcatatgcctgtagtcccagctactcgggaggcggaggcgggcggatcgcttgagcccaggaattccaggctagtctggaattcaagcgagaccctgtctctaaaataaaataaaatataacctaagcttgatgagaaagttagtattattcctagtttacagaagcgttacataacgagtcagagttaatcatggggtgcaaaggagacccgctgccttcacaaagtctccgagaaaacgcacgaaaaaataaacccaaactttctgaaaccaacccccgacatgccagctcctaaacccgacagacatccccgctggacactcacctccttcccggcttctgcctccgaccttctcggtctgggatgcgctctccaaccggcctggagctgaactgcgtctatttatggagaagcgggactccaggccgcgtttccggttccctgcgccgccccgtgattggtttagggccatagagtccattttacgtaatcggcgttgattatggttcccactgaaaccccacccacaggaaattaatgtactaaacatgcctactgtgcaaatatttcccgctctactgagttgtcatactgctgaagtatttggtggcctcagaaaatatagatttgcgagttttaaccattttgggtcccctcatgccacagacagtaatatcctaacaagtaaagaacatgttaagagctggtggattagtatcaaaccagtgatttgatctagtttgagcaaagctctcacatatgaatgtcaagatactgaaaaaaagagacagtctttgttgatacataatgaatattggtgataattttttactgaaaaaaagagacagtctttgttgatacataatgaatattggtgataattttttattttttaaaaagaatattggagttgacatgggaaagctttgtttgaactagactaaatcagtggtttgatatcagccaacctacccttatataaaaacagtgggaaccagagaaaggcacatggtccccactctgcattcattccaggacggtgatagggtggtttatagatacactgagggtcctacggggttccctagttctcagcccccctcagttagggctctcaagcacgaaaagccttaacggtgggtgtgaattttactgtgtggatcatggagttaatgtggaatgataattaagtgctaggcaggattagattacaatttgggaagttcacaccatcagttggatgacactaatccattcaagtagtgactcattcattttaatttcagaggaaaccttctcgtctaacctttaggacaaattggagggctgttaattttacactgattctggtttaaatccttggaaaatcttaagccgcttcactctgggaacttcaaacttcttgggagtagaactttcctgatgtgttgttttgaagatgaagtaagactatgtcagtaaagtgctcaatacaaggttcattttgccaagaaattgtaacaattattttctgaggcatgttctcatactttgttacattttttcttgtttaccactgaggtgttgactctaactcaactctaacaaatgagttagagttaagaatggaattattcactggaattaactgggagctgcctaagccactctctggctacccaattcccgattcccctaaatcctcccctctgtaaactcatagtcttatttctgtgaagctgccgttggtattttggaagagaccgcatcgaatctgctgatgtctattaatagtatggtctttttcacattctatgaacatggctttccatttttggtggtcttttttgttttttttcattagcacttaatagtttttcttgtggaaatctttcacctccctggttaaatttattaccaggtttttaggggttcttttgctattgtaaatgggattgctttcttggtttttgttccactagcttgttggtgtataaaaacactactgatttttgcatgttgacttcgtatcctgtagttttactgaattcctttatcagttctgttttactggtggaggtttcaggtgtttttatagatgataacatgttgtttgcaaagagagacaattcgacttcctccttctgaatttggatgccctttattccttgctctggctaagactttcccaacacattattattatattattattattattttgagacaaagtgtcgctctgtcacccaggctcactgcaacctctgcctcttgggttcgagcaattatttgcctcagcctcccaagtagctgggatttcaggcacacgccaccatgcccggtgaatttttc[142 bp omitted]acaaaggtcaccagggtgaagtttggaaacaggtatacgttgtgatgcaatcgtcagaaccaagctagttaacatctccatcacctcacatagataccatgttctttccttcttattagttatttaactcttgggctcaagcaatcctgcttcagcctccctagcagctggggttacaggcacgagccacatctggctttctttttatttcttgatgtgtgtgtgtgtgtgtgtgtgtgtgtgtgtgtgtgtgtgttggaaacatttaagatacaccctctgagcaaatttcaagtatacagtacagatgctcctcgacttacaatgaagttacatcctgataaaccctattgtgaatgtaaaatatagaaaataaaaatgcatttactattaggtcacttactgaacatcagcacttagcctagcctaccttcgacgtgctcagaacatttacattcccctgcagtcaggcaaaatcattcacaggaaacctattttataatagagcactgaatatctcatgtcgtttattgaacattgtactgaaagtgacaatcagaatggtgtgtgaatattcctcagtaacgtacacagctgaaagcagaactttgagatcagactggcaacatggcaaaacccagtctctacaaaaaaacacgaaagttcactgggcattatggtgcaagcctgtagtcccagctacctgggagtctgaggcagaagaattgcttgagcctgggaggtcaaggttgcagtgagctgtgatcacgccactgcactccagccagggtaacagagccagaccctttctcaaaaaataaatgaatacataaatgttcccctcatacaaaaaagataagtatgcaagtcactcatatgtcaaattattagatttagcattgcacgttgtatatatgtatcaaaacattatgttgtacaccaaaaatgtgtatgtaccatttttatttgtaaatttataaagttaataataataatgacaaaaagaaaataatgccttctctaagaatgcgtgaccaaccaccatccttccctcatgggaatgtggagtttcccttgtcttggatgcctaacagacctgtcaatcaccacacatcccagacctaccacatctttccccacctcacgtaaaggtggctccagcccccttgatgtgcaatccacaagatttgtggggttatccttgattcctgcatttccctcacatgacacactcagtctctcaacaaatcctataccttaattaatgtgtttattgacatgaatttcacgtgacataaaattaactgttttatctgtacagtttagcagcatttggtgcatttacactgctgtgcagcagctcctctagctggttcctgtgcctgcatgtccagagtccaagttctgacatttgtacatactcatgaagtcattgccgtcatcaagaagctgaacatccccaccatcctccaacgcttccccaggctcttcatcatctgtccctcccacagctccatccctggacaaccactggtgttctctgtgtcattacagatcacggacagaattttcttttttctttctttttttcttttctttttttttgagacagtgtcttgctctgttgcccaggctgcagtgcagtggtatgatcacggctcactgcagcctcaacttctcagccttaagtgaacctcctacctcagcccccccaggtggctgggaccactatgtccggctaattttttctactttttgtagagatgggtctcactacattgcctaggctgatcttgaactcctgggctcaagcaatccacctgcttttgcctcccaaagtgctgagattacatgtgtcagccactgtgcccagcctagtaatagaattttctagaattttatattgatagactcataccagatgcactttttttctggctgtcccctttcaccttcgtaactattttgagattcatccatgttcttgggtgttatcaatgatttctttttactgctgagtagtattccaaactttattaaattgggccctttggatatgagttatttattttatatcaactgtacctcaataagaccatgaaaaaaaaagaggattctcttaaaacttgaaaacaagttcagaatctgaccagctctcctcatctcaactaccagtactcatgggcaagccacagccatcaacctggctgactctgctgtgatccacactgagctcttttttcttccccttcccctatataggctaatttttttttctttttctttttctttttttcagacagggtcttgctctgttgcccaggctgaagcacagttgcacaatcatagctcactgcagcctccacctctcaggctcaagcaatcctctcacctcagcttccccagtagctgcgaccacaggtgtgcaccaccaggcctggctaattgttttgtatgtttttgtagacaccgagtttcaccatgttgcccaggctggtctttaactcctggacccaagcaatccaccagcctcagcttcttaaagtgctaggattacaggcatcagccatcatgtctgactatatgggcttatttccaagactttattccaaaaaaaatgttaaacagaagtcagaaagctactctatgaaggcagaggcattcgttggagctgtgagtgatgtacctgcaatgtctagattctaattttaggagttggcagtgtcaacccaattctgtctcaacactattcaatgactcaaataatggcagctccacctactagtacaatgggtcaagtttttacatttcacatgtgcctacaggatggggcctggcaggcttgagatgagacttctgcttgtttctatttagcttcagactgttgagaaagtcaggtcatggcattcatttagtccaaacatcattgtctataaaaacggtgtccacgttttgtctttgaaatggtccccgccctccgctcgttatcgtgttgagaatgaaatgagaggacatgcttggcacctggagatgattggatattacagctgtgcgccataagggcaaatggttccattgtttgatgagccatcctggcggtgggtggatcattcacttctaaacagataaggaatggctagaaagttcttgtaccaaaccaacttgaagcaacctcacccacaccgaatcctatacttttctatgaaatcacctttttttttttttttggagatctccaactttttttcacagctgcttaaaaaaaaatactactgttcaccccagactttcttttgatacactaagtaaacaaaacagattttttttttttgccataaatatcagcagacacttcctggcaccccacactgtatcagcatgtgtgttaacagtcccagttcagatgtgcagtgtttcaagtggatgcactgtaacaaggatgcaaatgcggagccaccctcagaataacattcagtcatggggttgcccttccaagctggcagaaaaggaacccgggccaggcaccgtgagcacgcacagtaactcacgcctgtaatcccagcactctggaaggctgaggcaggaggatttcttgagaccaggaatttgagaccagcctgggcaacatagtgagacccaactctacaaataagagattgtgtgtccggaggctgaactcacaaagatttcagaatgtcagtaggagaggaggtgtgtgggatagcagccaattcgtcagtgaatgaggcagagaaattggtaaaaagaaggaaagtgaaaacaagaagcatgttcccattttcaaggtcttcctggttcacaaagtgggaaggaagaaactactgaagaggaaagagttctcttgaagagtacagaattcctgggctccccggttcaggtcataaaaagaaaagagaaaacgtttgcagccatgcagggtgaacaagctctgaagatatattatacggactaggggttgtaatcaatgttagggaccatcccctacttctgagggctctgaggcaggagaatagggtgagggaagagagagaccctctcatattgttttatattgttttatactcaatacctgttttaaaaaaaaaacaacaaggaagtaaaaccaaagacaggcagcccggcgccaggcccgaaaccaggcctgggcctgcctggcctaaacccagtagttaaaaatcaactgataacttaaaaaccgatgttattcatagattccagacattgtatagaacaacattgtgaaactccctgccctgttctgtttctctctgaccaccggtgcatgcagcccctgtcacgtaccccttgcttgctcaaatcaatcacgaccctttcatgtgaaatccttagagttgtgagcccttaaaagggacaggaattgctcactcgtggagctcggatttcaaggcagtagcttgccaatgctcccagctgaataaagcccttccttctacaactcggtgtctgagaggtttcgtctgtggctcgtcctactacaagggaattagggtaaccaggggttaaggtagaagcaaaagaaccgcacttgcagccagttctaggcaagattaggcagcacacaggccacatcctcactcctgtgataacgagacagaagcctccactccagcctctgattgaccgtgggccaagcctccactccaacctctgatggacggtgggccaagcctccactccaacctctgatggacggtgggccaagcctccactccagcctctgattgaccgtgggccaagtctccactccagcctctgatggacggtgggccaagtctccactccagcctctgatggaccgtgggccaagtctccactccagcctctgatggatggtgggccaagcctccactccagcctctgatggaccgtgggccaagtctccactccagcctctgatggacggtgggccaagtctccactccagcctctgatggaccgtgggccaagtctccactccagcctctgatggatggtgggccaagcctccactccagcctctgatggacggtgggccaagcctccactccagcctctgatggacggtgggccaagtctccactccagcctctgatggacggtgggccaagcctccactccagcctctgattgaccgtgggccaagtctccactccagcctctgatggacggtgggccaagcctccactccagcctctgattgaccgtgggccaagtctccactccagcctctgatggacggtgggccaagtctccactccagcctctgatggaccgtgggccaagtctccactccagcctctgatggatggtgggccaagcctccactccagtctctgatggacggtgggccaagtctccactccagcctctgatggacagtgggccaagtctccactccagcctctgatggacggtgggccaagcctccactccagcctctgatggacggtgggccaagcctccattccagcctctgatggacggtgggccaagtctccactccagcctctgatggatggtgggccaagcctccactccagcctctgatggacggtgggccaagcctccactccagcctctgattgaccgtgggccaagcctccactccaacctctgatggacggtgggccaagcctccactccagcctctgatggacggtgggccaagtctccactccagcctctgatggacggtgggccaagcctccactccagcctctgatggacggtgggccaagtctccactccagcctctgatggacggtgggccaagcctccactccagcctctgatggacggtgggccaagcctccattccagcctctgatggacggtgggccaagtctccactccagcctctgattgaccgtgggccaagcctccactccagcctctgatggacggtgggccaagtctccactccagcctctgatggacggtgggccaagcctccactccagcctctgatggacggtgggccaagcctccattccagcctctgattgaccgtgggccaagcctccactccaacctctgatggacggtgggccaagcctccattccagcctctgatggacggtgggccaagtctccactccagcctctgatggatggtgggccaagcctccactccagcctctgatggacggtgggccaagtctccactccagcctctgatggacggtgggccaagcctccactccagcctctgatggacggtgggccaagcctccattccagcctctgatggacggtgggccaagcctccattccagcctctgatggacggtgggccacgcctccactccaacctctgattgaccgtgggccaagcctccactccagcctctgatggacggtgggccaagcctccattccagcctctgatggacggtgggccaagcctccactccaacctctgattgaccgtgggccaagcctccactccagcctctgatggacggtgggccaagtctccactccagcctctgatggatggtgggccaagcctccactccagcctctgacggacggtgggccaagtctccacgtcagcctctgactggtcgcaggtcagtccttcacggggtgtagccaatgggaggcctgtcaaagacaccgaggggtattgccgggttccttttaataaaaaccctaattgaggaagctcttgggcctcttgctggagccccgctcccagtctgtgaattgtcttcaataaacctgtgctttccttactccgtttttttgtgtttttgtctttcgttgctttgttcttttgttactttgtgcgtttcattcaattctctgttcaacacgcctagaacgtggacaactccatccggtaacagctccacgtacaatttttctcctttgcggcggtgctttcagctgtgcacattgctgaggaggatccacaccgccattctgattgtcactttcagttcagtattcaataaactacaggagagagtcaacactttattataaaataggttttctgttggacgattttgcccaactgtaggggaaggtacgtgttcagggcgggtttagggtaggctaggctaaactctgatgttttgtaggtgacataatattaaatgcattttttatcttctatattttcaatttatcaggatgtgacttcgctgtacgttgaagagcatccacactgtatcgcatacttgaaatttgctgagaagatcgattatgggccggggcgcggtggctcatgcctgtaattccattaatttgggaagctgagacgggcggatcgcttgagctcaggagtttgagaccagcctgggcaacatggcgaaaccccgtctctacaaataatataaaaattagccgggcatgggtggcgcctgtattcccagctgcttgggaggaagaggcagtaggatcatttgagcccgggaggtggaggttgcagtgacctgagattgtgccactgtgctccagcctgggtggcagagtgaggttctgtctcaaaaataaaaaaaatttaaaaaatgatagatcataagtgtttcaccacagacacacggacacacacacatacacacatacgcacacatacacacacacgtcaaagaaacaaaaagcaagccaggagtcgtggcatatgtgtctagtcccctagacacacacagagacacacccggacacacggaaacacatacgaacacacacccacacacagacacacacatggacatacacacatacgcacacatacacacacacacgtcaaagaaacaaaaagcaagccaggggttgtggcatatgctcttagtccccactactggggaggctgaggcaggaggattacttgaggccaggaattaagcaaataaataatgaaatgaaaatagtcactatgtgagttgacgaatacattaattagcttgattgtagtataattacaccatgaatagggatatgtaaacaccagcatggtgaccttagtcaccaaggacaggtagaggccaggaattggagagcagcctgggcaacacagtgatacccccatctttacaaaaaaatcttttaaaattagccaagtgtggtggtgcttgcctgtaattccagatactcactcaggaggctggagcaggaggctctcttgagcccaggggttcaaggctgcagtgagctatgagttttccattgcacccagccaaggtgagtgagaccttggctctaaaaataaatcaatcaataaacaaatttatccacacaggtaggagatctctacaagaaaaactataaaatactgatgagaggaaatgaagagggcacacaaatggaaagatagtccatgttcataaatcggaagaattcacattgtgaaaatgaccacactattaatagagatctatagatccaactcaatccctaccaaaatgccaaggacattccttatgagaacatgacatgtttcaagaggagaggactggagggaattgggtaggtagatggtggttttaggcagattctagttcattccacttaataactccattctgaactgactcactatcaacgcctcaattcttaacaaggaaaaatatcacaaagtatgagaaaatgcatcaggaaataagtgtcagaactttttggcaaaatgaccttgtgtcgggcactttactgacataatcttatatcatcttccaaagaacatatcaggaaggtaataattccctggttctattcacagggagcttgaagttcacaaaattcagtggcttaagatttcccaaggatttaaaccagaatcagtgtaatattaataacccttcaatgtatgttaagtgttagatgagaaaatttactctgaattaaaaatgaatgagccacaatttgaatggatttgtgaatcagtcagcggatgctgcgaacttcccaaattgtaacctaatcatgtaatctaatcatgacactcagttttcattccacaatgactccatgatccacgcagtataattcacacctaacattaaggcttttcacgtttgagaggcctcagtcagggggctgagaaccagggaaccctgtaggaccctcagtgtatctataaaccaccctctcaccgtcctggagtgagtgcagagtggggaccatgtgcctttctctggttcccactgtttttacataagggtaggttggctgatatcaaaccagtgatttagactagttcaagcaaagcttttccatgtgaattccaagagtttgaaaaagaaaagtaaagaattatcactaatatttattgtatatcagcaatgactgtatttttcaatatactgacattaatatgtgaaaggctttgcttaaactgcattaaatcactggtttgatattaatccaacaactcttaacatgtcctttatttgttaggatattactgtctgtgtggcgcgaggggacccaaagtgattaaaacttgtggacctagggccaggtgtggtggctcacgcctgtaatctcagcactttgggaggc[134 bp omitted]gaggcaggagaatcgcttgaacccaggaggtggagcttgcagtgagccgagatcacgccactgaactctagcctgggggacagtgtgagactctgtctcaaaaaaaaccaaaagaagaaaaaaaaacccataaaaccaaacaaaaaaaaacttgtggatctatattttctgaggcctccaaatacttcagcaatatgacaaataattcagtagagtgggaaaacctatgttatttgcacagtaggcatgtttaatactttaacttcctgtgggcagggtttcattgggaaatgtaatcaactcggatcacctaaaatggattacgtggccctaaaccaatcatggggcagtgcaggaactggaaatggggcctggagtccttcgacttctccataaataggcgcagttcagctccaggccagttggagagtgcatcccagatgcgagaaagttggaggcataaggcgggaaggaggtaagtgtccagaggccatgtctgtggggtttaggagctggcatgcaggggggttagtttcagaaagatttgggtttattttctcatgcatttgcttggagaccttgtgaaagcatcgggtctcctttgcaccccgtgattaactctggcttgttatgaaacccttatgtaaactaggaataatattaactttctcatcatgggtaggttacattttagagacgggggtctcactcattgcccaggctggcttgaattcctggtctccagtcattggcgagacttcacttcaccatcagctgggacgacaggcacctacctgccaacaggcccggctacattttatttttttgtagagatggggtctcggtatgttgcacaggctggtcttgaactcctaggctcaagcaatcataccacctgggtcttccaaactgttggaattacaggcgtgagccaccttgccggccgcactccacttgttaaaaagcatcactggattttccctttccacagggtaaaatcagccattaatgaatgagcatcaacctactaggccaatgagaatgtgcactaagtgtccctacctgggggtcctgtgtgctatatactcccagaattgaatactaacccgcatacctgcctttattttttcccatgttccattgcttgctttaatgggaaaagaactgagagtgaatacacggtgatttctaggaacatgaaaccacttttttaagagacaggatctcactatgttgcccaggctgttatcaaactcctgggctcaagtgatcctcttgccttggcctgagcagcagcaggcgcccttgcagcaaagccacttttaattccagaattttaggctctcttttctctctcatatttgtatgcttttttcaaaaaaaattaatttgctttcaaattgaaaactaaaaattgtatacaattgggcacagcataatgtgctttgtaggatgtgaacgctgtaaaatggctaaattaagctgctattcacatgccttactttatgtactaatcatttttggctgtgagaatacttgattgaaatctactcttttagcaatttccaagcatacattgttatgaactgaagtcaccatgttggacaacggctctcttgaattcatctctccaactgaaatttgtacccttagacctatatctccccaacccccatcccagccctggtaaccaccattctactcactgctactatgagtccactaggcttttaaaattattattcatgtcatctacttcttttttaattttttaaatgattttaacttgtattttagattcgctgggtgcctgtgcagatttgttacatgagtgtattgagtgatgctgagatttggggtatgactcaacccgtcacccaggatgtgaggagcacccgataggtagtttttcaaccctccctccctctatccctccagagtttcactgttttggagtccacgtcctgatttcctttcctctgtgtacctgccccggagcgggattgccggatcatgcagttgttggactttcaattttctgaggagcttctatactgtctcccatatcggctgctctaatttacatcccagcacggggcgcagaggacccctttcccccgaatcctcaccaacactcgttccatgtgtctttttgggaacagccactctagcaggcgtgaggggtgccttgtggtttggatttgcatgtccctgatgatgagtgatgacgagcaccttttcctagacctgctggccattcacatgtcttcatctgaggtgtccacagaggcaccttgcccacttctagcgggttatgtgttttcttgctctggagtagtttgagttgcttatgttttgcacaggaactgcttgtgagatgtgtggtgtgtaaatattgtctcctctgggttgtcttccccctctgctgattgtctccctggctgtctctgtgttctgtacttgctcagattccttccaggaagcgtaggttttccatccttcaggattccagtgacctttcccgagaccctcctgtcaattctttcttccttctgaagacctttcggttgcttcccccacctgtggctaggaagacagggctgcgttctcacagctgttgaacttggataataactgatgcctggagagtatcacacagtgtgtcctgcctaatgaaactacatttagaaccaaatttcaaaaaatcgttctttctttctctcttttttttttgagacggagtctcgctcttgttgcccaggctggagtgcaatggcgtgatgtcggctcactacaacttccacctccctgattcaagtgattctcctgcctcagactgccaagtagctaggattacaggcacgtgccaccatgcccggctaatttttgtattttgagtagagacgaagtttcaccatcttggtcaggctggtctcgaactcctgacctcaagtgatcctcccgtcttggcctcccaaagtgttgggactacaggcatgagccaccacacctggcctcaaaaaatctatcgtattatttcacttcctgaaaatttcatagagcactagactttaaatccattttctgagatgagattaggaatagagaaacccttagagacagaaggtagatcagtgattggcaggggctggggtgggtgggcagagggtgatcattgatggggatggggttccttttgggctgatgagacaattctggagctagacagtggtgatggttgcacagcatggtgcatgcatgtcttagtgccatgaaattgtgcacttcaagatggtaaaaatgatgaaatttatgaatgtgcattttaccaaaatagcaatatctgtgtaggagttgaattctcatgattacttaatgctctcccttccctggagcaaacaaatgtcctggggttaacaagaaaaggtgttgggggacaactgtaggttgtaactatttttctctatctttgtgcgtaattatgatgaagggctttaccttggatcttgtctggacaggaaaacataaataagttattgttgcatcagattttaggagcttcacataagtatcctatttaatttacagttgggaaccatgttgttccaattgaaaaaaaaactgatttcacttctgcacaatgatttcctggagatcagaatccaggggagcattaggattttaaatcagaacatatagtcaggtgtagacagcggaagagtaacagggtgggttgatttccactgtgctgaattcgatgctgctgaagaagtggcgtccaggatttggatgagggttttggaagggatgggtggatagactagaaactttgatcgggctcatgtttttttttgcagacttctgaacagtgaatctattattgaggaaaaccaaaggaggcctgtctagataggtctcaattagacaccagctactggaagaactttctcagagactgactgaaatattctccaccagatatggctgcaaattgcaactcctcatggggtcagggaggaccctgcaacagccctgagtcagagccgccacagtctgtggcttccccagaaactcaacttggaaatcatgactgggaccctgagacttgtcacgtgaacttcaggatgttcagctgcccagaggagtcggaccccatccaggctctgaggaaactcactgagctgtgccatctgtggctgaggcccgacctccacaccaaagagcagatcctggacatgctggtgatggagcagttcatgatctccatgccccaggagctccaggtcttagtcaaggtgaacggtgtgcagagctgcaaagacctggaggacctgctacgaaataacagaagacccaagaaatgggtgagtgggaccctcgtgactggtgcagggaaggggagctgggatgggggctgcacggtgcagctggactcgagaggacccgaggggctgctctaggtcagggcttccaagtagaggagagtttgcccatcagggacacatggcagtgtctggggacagtttttgttgtcacaagggggaggacaggagacgctgctaagcattctctaatgctcaggacaacccaccatgacaaataatcttccagattccaatatcagctgtgctgagacggcaagttcctggtgtaggagatggacaggcagagggggtacagggacccacacactgtgtgaggccaacatgaaagaaagacattggtgaaatattaggtctgatggaatgtagggaaggaggcattagagtgaactgaagcggggcccaggagtcccatcctgaagcagggaaagtggttggtatcagatgcagggatctgcctccaggtccccaaatgagcccctaagttctaatacaaggtgagctgccatcggccaattgagttggattcacccagaatatttctccttgtcttctctttggtttagagaccctttcatctaaaggactcatatttatgtacttatgtagaaaaggaaaaaattcagacagattgctgtgtccacagagctgattctgcattgggaaggcagatttgaacattacagtaaagtgtgagcattatggcaggacccagggaatatgagagctactttcaggttctcatagtgagtctgattgtcttttttctctctacagtctgtggtcaattttcttggcaaggaatatcttatgcaggaatcagatgtcgagatggctgaaatccctgccagtgtcagagatgatccgagaggcgtgtccagccagcgggcctcctctgtgaatgagatgcgtccgggggaaggccaggccagccaagagctgcagaccctgcccagggtccctgcactgtccagaaggcaggtgagtgtgtgaggccctggtgtctgggcagaggtgggagaaggaacaggagaaaactgagtgtgcctctggactgattgagagatttggcacaggacaagaacagagacattccccatggatgtgttacatccttagacattcctgagtcatcacagagaatgaagcctcatctacttttctctccaccatgagagcttttagcatgtagggtggggggtcagaaatggtctcagtgaaatgagggaggcagttggcaccgatgaatgaactgaaggtcccttccccattcagtttcctcaaagacatttaatgtcataattcagcaaggagcgcactttctacagattgtcaatttcttaatttgaggagtgtttctcaactggggtgattttgcctttcaggacacatggccatgtctggagatgtgtttgtgtgtcattgtagggggtggtggggtgttgatagcatctagagggtggaggcggggtctctgctctgcacaggagcgccccctccaggagggtgatgcagccccaatgccagtggtgccaggggttaggggcctccacctagagtcatgctccttccagtgtcaggggcagggagacgttggcacagcggggagaaatatgctcagagaaccaaacagtgaaaaccaccaggcacaggagctgatttagaatatggagggtgcagattagggagagactcagaaatgaggtggtgatgtttatttgggatgatgtgggaggcccataggaagtctgcacgtatccctaaacctgtgtcattagaaaagttggtgtatccagtcaggaagggacagtgatgtccatgacccaccagtttagacagggcagtcattgctgttggttttccattgtcaggaagaggacttcctgctgccagagactactgtcatgaaaagtgccccaaaggctctgagacccaagccaaccttggagaaggatctgaacgtagacagggaagaaaacacgggacttacatccccagagcctcagcttccaaacggtcctagtgagtatgaagacttggatccacaggggttagcccctctcttctggggtgtggggctggggtcccagcattatcatgtctgggggagttggcactcagctgccaaagcctctccatcccttactctccagagacctacggtccaatgtcttaggtttaaggttgaggggaagttgtcagccaacatcagtgtttggttgcaatgagtttggtgtattgaaaatgtaccttattaactgttgtgtgtggaatcccttcttccagcaggtgtggtgggagcaaaggaggggaaggaacccaaaaaaagagcctctgtcgaaaatgtggatgctgacacaccttctgcctgcgttgtggagagagaagcttcgactcacagcgggagcagaggagacgctctgaatctgagatgtcccaaaagaagcaaaccagacgccacctccatttcccaagaagggcctcaaggaggagccacacctgtgggcaacagcgaatccccaggaaaacctgagataaattcagtttattccccaggccctgcaggtgcagtcagtcaccccaatggccaagaagccaaggaactgctgccctttgcatgtggcgtgtgcaataagaggtttacgtgtaattccaagctagccatccacatgagatcacacacaggagagagaccctttcaatgtaatttctgtgagaggtgcttcacgcagctctcagacctccgcgtccaccagcgaatccacactggtgagaagccctacacatgtgacatctgtcacaaacggttcaacaggatgttctccttgaagtgtcacaagaggagccacacgggggagaagccctataaatgtaaggactgcaaccaagttttcacctacaggaagaacctgaacgagcacaagctcatccactccggagagaaaccctataaatgtcccaagtgtctaagagcctttcgtcggcctgaaacgttaaaataccaccagaaaacacatcaagaaaccactgcacccagagaatgtgaaggatgatttttcactgacgctattagatgagatatgacatgaagcaggtgcaagggcgcctggcacacagagggagtgccctagataggaattgccaggatgtcggagtaaatattcattctccccacagagctttattttctgtttcattaggtccattgttttcgtacaggtttatgtgggtgtgtgttgctgttctttcttttattattttttttgagacggagtcttgttctgtcacccaggctggagtgcagtggtgcgatctcggctcactgccagctcagtctcccaggttcacatcattctcctgcctcagcctcccgagtagctgggactacaggcgcctgcca[195 bp omitted]aaaacggagccttctgattgacatgctattacccactgttttgctgtaaattaaagttgtcaaagtaggtgtccagattaaatacacaatgcctggggaaatctgtgtttcaaataaacaatttttttttagtatcagcttgttctaaattattcattatttatctgaaactcagcttctattgggtatcctgtattgttttcttttttgcttctttttcttctcttttcttttcttttgagatggggcctcactctttcacccaggctgcagtgcagtggtgtaatcacagctcactgcagacctgacctccacggctcaagcaattctgccgtcttggccgccggagtagctgggactagaacacaccacaccatgtcagctaatttttgtatttttttgtagagaggggttttgccacgttgcccagcctggtcttgaactcctgagttcaagtgatctgcctgcctcggccccccaaagtgctattacgggtgtgagccactgcatcctgtattgtttgtattaggctttattagtattattttattcaaattttttgaaataattttttgtagtgatgggatctggttttgttgccaaggctggtctcaaagtcctggcctcaagcgatccttccaccttggcctccagaagtgctcggagtatacgtgtgagccaccacgcctggctaatgactttttcagagctgttttaggttcacagggaaattcagtggacagcacagagttcccctagactccctccccacacggcacagcctctccccgcccagcatccccagcagagcggtgcacctgttccatcagtgagcctgcctggacatatcaccaccacccagagtccatggtgttcattagggctcgctctgggtgttgtacatcctgtgggtttggacaaaggcctcatgagtatccaccactggagtatcatgggggatattttcactgccccccccgaatcctctctgctctgcctatttatctccccgccccagatggtgtatttcttggtctaaatttggcaacttctaaattcctgatttgaatcttgaactacagaggcattgggagtctctggtgactagttggtcttagtgatagtaccacatcctgaaggctttgctaatctacaaaagggtgggccctgatcccagagcttccagtttagtagatcaggggtgtggccttagagtttgcattgaaaaatagacttcattttattttagaccaagtctcactctgtcacccaggctggctggagtgcagtcgcgcaatctcggctcaccccaacctccacctcccgggttgaagcaattcacttgcctcagccttctgagtagctgcaattacaggtgtgccgccaccacgcctggctaattttttatttttagtagagacagggtttcgccatgttggccaggctggtctggagcttctgatcttgggtgatctgcctggctcagcctcccaatgtgctgggattacatgagcacgagccgccatacctggccttagatttcatcttagaatatctttcaaaagtctatagagctcgccaatgctctgcaccatttcccccactgttcacatggttctttaatacggcacatttgccacaagcgatgagctgactctgtatattgctgtgaactcaggtgcctattttattgagacctcctcagtgttgatacgatggcctcctcttccttcttttccatccaaggcgccacattgccttgagttgtcatgcctccctaggctcctcttggtgaaaatttctcagattttacttgttttaaataacctgagcatctgcattttcagtgatgctgatgctgctggtcttgggagggtatttcatgaatggctggttgagctcacagaggcagagaccagagatcctcagaactccggaaataggctggattcatttattaaagttcactgttgtgacacctcggttcttgtcttcttaatttaaaggaatgtaaacaatagacacacagtaaaagagatgcagcatagagtaattcattgcaaaggaataagaaaattttgaaaggtaagggcagaatagacaggacaccctgagagagtggatttaaggctggctgctcctaaggataagatagcaaagacctgctcaagagcgactccctttctccatccccagacaattttgaaacatattgatgcctgactctcaccctcaagagatacgagtttgagtcgatacttggaaatcaggtttaaaaaatttttccaggtaattctaatgtgcaacaaaggttgagaaccactggtgtacagtataaagagaaatttctagcatctcgcttcatttactgtaacctcgtggccctcaaatttttaatgtgcatataattcaccctcagatcttgttaaaatgcagggtctgattcagtgacaggctccaggtgaggcacatgctgctcgtcaatagaccctcatttcagtggtgaggaggcagtctcctctgggttccagctttgcatcaactgagcaaaatcttaccatctcttactgctcaagtcagcatcttgaggccagtgtctgataagtgcatttgaaatattcaatccttctggtttcttacccagaatgctacactaagtgttttatttctcccacatccgctcctacccaacggctttccacccattatcacatggcagccatactgagtatgaaagtgagcaaatctaatcctgctgttacactctttacattttattttctatggattctattctttttagcaaaaagaccatgtgctttatgtggcctaagctattcaactaaatgaccactgatcccagcactttgggaggccaaggcaggcagatcacgagggcaaaagatcaagaccatcctggctaacacagtgaaatcctgtctctactaaaaatacaaaaaattagtcaggtgtggtggcatgcacctgtagtcccagctacttgggaagctggggcaggagaatcgcttgaacccgggtggcagagattgcagtgagccaagatcgtgccactgcactccagcctgggcaacagagctagactccgtgtaaaaaaaaaaaaaaaaaagaccactgatgacccttgtgactgtcagtctctgttaccctccgtacttcaggaagacccttctgtattcagtgactgactgggggtgcctttctccatgatgtttaatttttttgaatgggggatgtctatggcccatttttggtgcttttctgtgtagttgaagatacactagttttggacttttggcctttatccactttctagcgtattctttctctggggaaaaatgattgggagtttcgaaagagaatctgcattgagaagctgtatcagtcagagtccaatgaagagaaaaaaacccacagcaatttgcacaagcagcatttaatataaagcaggggctggcacacgatggcctgctaccttcaatagcccacagctagaaaatagttttgtgtgtgtgtgttttacagggtcttattctgtcactcaggatggagtgcagtagcatgatcatagcttactgaagccttgatctcctgggcaccagcttccagcaggtgattgtgttaagtgaaataagccagtccaagttatcctgcccgctcagcctggctaatttttaaatgtttttatagagacagtgtctcactatgttgcccaggccagtctcaaagtcctgagctcaattgatcttcctgccttggccttccaaagcgctggaattacagatgtgaaccagcacacctgggcaagaattgttttttatatttttaaagtgtggtaatatgagcaaaccagagaagaatatccaacatagaccaaatagcctgcaaaacctaaaatatatattctctgctcctttgtggaaaaaagctttctgacctccaaaataaagatttattgaccacaacatgggcctaactataaagaaaaaagaattctgaaggatacctagggaggaaggtttctcagaggaatgggaatccattgacaaattttaaagaatggagcagcacaattgggtttacctaatttaaagctcaacatgcctgtcaagtgataatggattggagggtgctgggtaagagaggatatgggagcaatcaagattctcttatggttttctgggagagaaaaaggagaactgatggattcaggtgcacctacccaaacctggcttgagcaggtgagaggctgtaacaacgcaaaggttggggccgcccaggagaaaaaggattacaccacccaaaattgagtttgaatgttaagactgaggacacacacatacccacactccaagagggtatgaagcttattacataacaggatttctgaagagagcagagtgggctttcccaagctggtctgaatgtggcttgagagggcagagaaaggaggctggtttggggttggggttttatggtgcttaggggatgggccacagccaggggtactgcacagggtttgaactccccactggcactagaagagggagtacccaggttttctaatcagcttgtccagctgtggggtgataagaaacaaacatcaaacatggtcaaacttttaataatcccaaggaaagagcaagtcaaaagtggaggtatgaacctcaacgtctgggtgaggcctctggttgggcaagggtgggaccatggtcaccaggggaaataggaggcagccttctggggtccaggggccaaggctggtggctggagtatggagaggcctgtggtaaggcagccacaggcaggagctggggtcgtgaacacgccagggggccccattcacgtggggctgacaaggccataacaggagcaagaagaaagacaagatggcggcgcagtggcgcctcttcctcctgggatatccctcccaccccctctagtggcagagcctagcactgcgctccctgcaaagttgccaggacagctccgtgattgcagggccggcactgaacctgtggacttagaagctgggaggcaattgactggtaactgacacagaagccctgttcctttcccttgcagaggtgtgagcctataggttcagttactctggaggctgaggtgggaggatcacctgagcctgggaattttgagctgtgattgtgccactgcactccagcttgggtgacagagcaagaggctgtctcaaaaaaaaaaaaaaaaaaagtcctctggatggtcagaagagcaacagaaggtgggcagggaggaggggtggagggggagagaaaaaaagatggagagagaaatttgtggaccccaagaatatagctcacctagaaaggttggaacacctgaaatggaagtagtggcttgtccgcaggatcatagaacttgtaaaagaatcccgtgcaccaaataaagcacgcaaataacaggaaaatgccagaaagctgaacacctgggtggcagtctgtgcaccccagtgaagggacgtgaacaagtggctcccatcggtgtgctggcaagacacacactggctggaggtgagggttgtgatattaaggactgaggtgaacagttttgaacgttgggatgtcaacagaatgaggacgcgtggggagacgttatccggtgttacagacactaaatacatttttttttcttacaataagaagttgaagatctgagtggatgagaactggagaaagtagggatgcagtgtctcttcgtcaattcaggttttgcacggggtaaggtggctgtgtctaagccggtgccactagcatcatacgcacccagcttatgttaaaaatttaaagttagaatgattttatagctaatttgtatagttatgacagatgtccagcagatggcagaaaagatcttgttctaacagataacagctagatggttctgcttctgtttgacattaaacataaccaaagcgtcaaacaacagaaaaggttatctaactgatataccagtgaatgagcatctttttttttttttttaaataagtcttcctcttctgttagtgtgaggctaaatttggtggttcatatgatggttcactcgatctgacatttttttcttgtactctactagaatgtatatttaaattttataatgaaatattttattattatacaaatcattgttgttggtcccaaagtattacataaactttggttgctatatataattacattctaattagtgtatagactattttatttattatacaatttcaggaggagaccaatgttttcatcatcttacctattagttgtaacaaattctaggataaactgctaacattattatattattttttctggtgtcaaatgaggtctttgtagcatgtgtcacaatgtcctccctttggaaaggggaataatattccattgtacagatggaccatattttgtttatctattccttcagtgaacgcttgggtagctcctacttctgagctattgtgaataacgttgcaatgaacataggagtatgagttcctgcttccaattttttaggtacataagcagaagtggcattcctggattatatcgtaattctatgtttaatttttggggggggctgccatgctgttttccttgtgtattaacagtataccagggttcccatttctccacatccttggcaaaatttgttattttctgttttttgatagcagtggtgtggttttgatttacatttccctaattattagtgaggtggagtgccttttcttgtgtctgttggccatttgtagaccttctttggagaaatgtctaagttctttgcccattttaaaatcatgttgttagtgttttgttgttgagttagcgttctttatatactctggagatgaaccccttttcagatatgtaatgtgcgaatatggtatccccctattccattggttgctttcactctgttgattgtgacctttgatgcaaaaactgtgagttttaaaatatatattttaaaatatatattttcttattacaattttatttaggaataagtgaggtacagtaaatggcacgttatcagtttatgatttgtcgtgttctgacattttcacaggctttctgcatttttaaagctgctcccattggaaacaggaaaggaacttccattttagttaggaaagcttttgaataatatttagatagtccaaaaaatacacaaagtgatatataacctacaattccaagaacgtcaatattgagcaaagcgtggacaatagccggctgagcgcacaaggtggggagtggggagggaagctatggatttgcctgtggtagggaagactttgcccagtcagccacagagaattagaaagtctgccgcccgctgctgcccacgagcaaacagaaaaacaaaaaacccaacctgcctcagtgctcacaggccgactctgtgccgtagcccagtgcaactctccacctgccatctcactgtttcactccctctaacgggtccacgttgattaattcccaaacccctcttgcctgtgacccaacgtggtttttccctttggctttttttttttctccctcaaagaagctgtttttcttgccagccctgagatgggttgaataaactgatcataattacacagcctacctggacggatgaaaaacatggtgtcgtctattctcagggtccctaggagggttgttagggtggttttaatgagtcccaaagcacctggctctatttctgcccgttgagctgctaaactggcatcaaaaagttaactctgaggaggcagaaaacatgatttgttaactgctggcctcaagggtgacttgatttatttcagggcttatttaaaaaacagtaattattgcctgtttccaatcctgaagataacatacatgcatgtagtgaatacatttggaaattgtattcccatgaaacttttaatgagatatttgaatagaacttgttaagtagctggtaaagttcagaagagaaaatgcacacacactaaaaaactagaaacacaataaaaagaaagaacagtcaggaggaaatgctttaaaatacagaaaaaaggataatggagaatatatgtcatccataatcccaccataaagagaggattttaaattttttgttgttttgtttgtttgtttgagacagggtcttactctgttgcccaggctggagtgcagtggtgcgatcatagctcactgcagccttgacctcctgggctcaagcaatcctccctcctcggcctcctgagtagctgggattatgggtgcacaccaccacacccggctaatcttttgtggtttttgtagagacagagttctgtcatgttgcccaggttggtcttgaactcctgagctcaagtgatcctcccaccttagcctcccaaccaaagtgctgggattacagagtaagccactgtgctcagcctgtatttttaatatgtagtgcatgtccttacatttttcaggtgtgtgcgtgtatacatatatacatacatgcattatatatattgtatatacacatatccacagacacgtattttaagatgcagaaaaacgggggagacactgaggagatttaaacatgggtgtggcatgattcaaatttcatatcattctggcagttagtgtggagacagatataggggcagcccctggtggcagggaccagtgggcaggtcacccagggcttgatccctgacatccagtcgtgtgacgattgtgtcctgagttcagggaagggctgttgatgaagcagaagaaatgtttgagaagcactggaaaaatccggagccacctgttttgcgatggattatctgttgcagatagtggtgaaaaaaaaaagcaaacaggtggttctgggatccccccgaaagggaaacccaagatgaggagctggtgggaaggggaaattaaatgctcatttaacttaacatgtgggatgtccagaggtgtatttgccatcaggggaatacctgcgtaagggctctggaatagacacctgacttggctatcatttctagcggggttagatagcccctcaaaagacagagtgtggagagaagagccacatgtcaggcttaggtccaagaggggcgagtttgcagaaggagtgatggcaggagagcggggaaccaggggcatcccaagtttggacagaagcaatgtgaatggacacgaaaggagagattcgagtgagatttacacgttagaatccctggaaccaggtgactgatcagggctgggagaacaaagggaggcaggtggagatgaacccaagggctgatctccacgttcccaacagatgtcacgggaggatacagaacacttgtccctgggatatggactgcagtgtccctgcagtactaaacagaccattggtatgtgggagcgagatgcccaccattgttacctggctgaagagctggtcccctttcacacctggctcctgcctcccaccactgcccatcttcttagacacaggcgccgggggactctgcaagcctttcacacctggctcctacctcctaccactgcccatcttcttagacacaggcgctgggggactctggaagcctttcacacctggctcctgcctcccaccactgcccatcttcttagacacaggcgccgggggactctgcaagcctttcacacctggctcctgcctcctaccactgcccatcttcttagacacaggcgccaggggactctgcaagcctttcacacctggctcctgcctcccaccactgcccatcttcttagacacaggcgccgggagactctgcaagcctttcacacctggctcctgcctcccaccactgcccgatcttcttagacacaggcgccgggagactctgcaagcctttcacacctggctcctgcctcccaccactgcccgatcttcttagacacaggcgccgggagactgcaagcctttcacacctggctcctgcctcccaccactgcccgatcttcttagacacaggcgccgggagactctgcaagcctttcacacctggctcctgcctcctaccactgcccatcttcttagacacaggtgctgggggattctgcaagcctttcgcaggttcccaggactcagctcccacccgcctcttggtgctataacagggtagtgagggggtgtggtttcagcacaaccaagcttatctcttctgtgagccttttctgggccaccaatagagtcttccataaatactgagcactgactacgtatcaggtctcgtgtgggcacaagggacactgagaggaaatggagtccttgtccttgaaggtctcaccttccagtgtgggggtgacggacacgccttccagtgtgggggtgacggacacgccttccagtgtgggtgttgacagacacaccttccagtgtggggggtgacagagacgccttccagtgtgggggtgacggacacaccttccagtgtgggggggtgacagacacaccttccagtgtggggagtgacagacacactttccagtgtagggggtgacagacacgccttccagtgtggggggtgaccgacacgccttccggtgtagggggtaacagacacacaaacacacttgctgtggtttttgaagatgatcacaacactctcccatctgatctgttcaaatgtgtcaggtcctcatcaagaggtggagttggatttccatccccttgcatctgggcagggctgtgacttgcttgtctccaacagaaagtggcagaagggacattgcgtgactcctgaggctaggtcagaaaagacgacacaacctcccccttaagtgcacgaaggcctcagttcccctcagctgtcccattgtccagaggctgccatgttgtgagggagccccacctagcccacgacacacggagaggacctgagacagcatgagaagagagagctggtgggtgggccccagctgtttcagtcacctggagatccagctctagtcagcacagaagagaccctgagcctaaccacccagctgagcccaccaccgatttcctgacccacagagatactaaaagcactgttgttctgagtcactgagttttggggtgatgtgttatacagctacagataactggaacagcattgtgtcttcccaccctgtacttattttattaattttttttttaaaatagagatgaggtcttaccatgttgcccaggctggtctgagcaacatggtagaaccatgaacttctgagctcaagcaatccaccagcctcggactcccaaagtgctgggattacagatgtgagctaccgcgcctggctgcaccctgtaattctgatcttaccctcttcttacctggaccctcgtacgatttccctgggatctcagtctctagaattcaatcagccttttctttgggatttggttcctgttcatgcctctcgtttacccgttctgtcctctctgccccttttgtttattgagaggcacttgtgagatctatggaggtatgcttgtggcgtgtgtactaaaaattttagtggcagaaaattcatgtgtttgagtagctaaaaatggattttaagggagtttcatactcaggatttgtgtgcatgccaagcagcttatctgaaagtaaatgaaaaagttgaccgggcacggtggcccacgcctgtcatcccagcactttgggaggccaaggcaggtgaactgcttgagttcaggagtttaagattagcctgggcaatgtaacgaaaccccatctctacaaaaaatataaaaattagctgggcatggtggcacttgactgtggtcccagctactcagcaggctgaggtggaggctagtttaagccagggaagtcgaggctgcaaatgagctgtgatcgtgcccttgcacgccagcctgggtgacagagcgagaccttgttttaaaaaaataaaaattaaaaaattgttaaatgctataaaaaatgtttttaaaaagaaaaaagttaataaaaataacaatgaaacaatatcggcaaggagaacaccactaacttcaggtttgagcctctgctctcaactagcaaaacttttctaagctctgtaatatctaccaaccatggacatattagagaatattttgggaaatatatagattttgttttagtaattaaatatttttttacttttttttttttttttttggagacagtttcactcttgttgcccaggctggagtgcaatggtgcgatctcggctcactgcaacctccgcttccagggttcaagcaattctcctgccttagccttcctagtagctgggattacaggcatgtgccaccacgcccggctagttatgtatttttagtagagatggggtttctccatgttggtcaggctggtctcgaactctcgacctcaggtgatccgcccgcctcggcctcccaaagtgctgggattccaggcatgagccaccgcgcctgggcttttttttacatttttttaatttcttttttcttttttttccctctggtgttgaaactaatataattacatattttaatgtgcagtaaaatatcagtaggacaaaaatctgcaattttattgtatttaggtattgcttaggataaagctacagtgaccatctaagtaaacaagttaatatgtttgaggaaaatcaatcaataaaaagtaatactaaggatacacatggaattgacaaaaaactaggaggtggtactttcttgagagaagcttgggaagccctgagctagaagatatttttcttttaatttataaacatttggagagcactcttttttgtaaaaattacctcacttaaactccacaaccaactgcaagaaactgttacactcattttatagaaatggaaaatgtggctgggcgtggtggctcatgtctgtaatcccaacactttgggaggccgaggcgggtggatcatctgaggtcaggagttcaagaccagcctggccaacatggtgaaaccccatctctactaaaaatacaaaaattagccaggtgtggtggcaggcacctgtaatcccagctacttgggaggctgaggcaggagaatctcttgaacttgggaggcggaggttgcagtgagctgagattgtgccactgcactccagcctgggtgacagagcaagactctcaaaaaaaaaaaagaaaaaaataaaatgtagggagcttaagtgacagagacaggaattaagtccaaagcctggctgatggccaaattgatgttgtctacaggatatggtactgatctcccagtggtagctcaggggctgtgacattcctagaacaggcatctaatctgcctccattaatcatggaggacttcctgaaggaagtgacatctgagctgggactttcccttagctcagggacatctttctcccaagcatggcccccactggtgaatgaaacctaattttctttagagagaaccctgttatctgtccagtattccccagaagaggctggataaagcacagatagctgcctgacttgaaagtgtctttcaggactggatcagatccaggagcaaattgagagagagagggagagagagagggagacagagagagagaatcaaaatacaactgaaaagtgtattaggggagaaaaaggggagaaaaagagattatttcttcagactaatatcctgtttggaaacaccaaaaactgatattattgaaaatttcacatgtaaaataaagagcttaaataacaattcaagtctaaagtttggctatcacaatttttctttatttttgtttgtttattgaggtataacttacatatagtgaagtgtacaattcttaaggttacagtttaataaatttttacatatggatagacggatagattcacataactatgacccagataagaagacacaatatttccagtacctcagaagtctccctcttgcccctccaatctgtgcctacctacaggtaaccacttttctaactttttttttgagatggagtctcactctgttgcccaggctggagtgcaatctcagctctctgcaacctctgcctccctcccaggttcaagtgattctcctgactcagcgtcctgagtagctggggttacaggcgcctgccaccatgatcggctaatttttgtattttttagtagagacaaggtttcaccatgttggccaggttggtctggaactcctggcctcaagtgatccacccgcctcagcctcccaaagtgctaggattacaggcatgagccaccgtgcccggcccacttttctaacttctatcaccataaattaattttgactattttagagtttcataaaagttgtatgttacagtatgcagtctcgtttctaatttttttttttttgtttttttgtttttttgagacggagttttgctcctgttgcccaggctggcgtgcaatggcatgatcttggctcactgcaacctctgcctcctgggttcaagcaattctcctgcctcagcctcccagtatcccaagtaactggcattacaggcacccaccaccatgcccggctaatttttttgtgtctttagtagagacggggtttcaccatgttagccacactggtctcgaactcctgacctcaagtaatccacccaccacagcctcccaaaatgctgagattacaggcatgagccactgcgcccggccctgattttcattcaacattatattgataaaagtcatccatgtggttgtatgtatcgatagttcatcctttttattgctgtgcaatattccattgatttatttatccattccttgatttatttatccattctattgttgacggacacttggattatttccaacgtttatctatatgggtaattatgctgtaagtcgttttgcatatgtcttttggtagaaacaatacttttttaaaaacaaatttagtagattataaattccttagtgatgggtaaggtaggagtatgtattactgaacatagagacacttggtagagactcctcacatgcacatctgaatgatgccttgggactaggcagtgatcctttgcccttcttggggccaggcatacctccaatgacttggtaacagcttcaactcttcttccaagaagattgcccacatactcaacatttagcattgggcttctggaatgtggtgatatctaaggttcttccagctttggcctacatgagacggtgagctgggtgaagtgcattttaagggcaagcgctgagctccagcttatgaggaatagccctccaatgtgccaggaacatgttatgtgccctctggaacaaataatatttcacttttccgaaagccagagctttgggatcccagatctagtaagaatcatcttattcatcttcctttcatctccaagccagaaggaggctcgttgaatttacagggatggagttgcaaagggcattaaggaatcctgcatctatgctatcaggacctaccagtcccaagtggctttgatagataaaatgttctgagtgccttaacccagaaaaactgcaactctagaccctggatgttctaaacgacgcaatcagaacatcttcccatattctttggaagaaactctaacactttcctctttctacttctacctaaaacatctgaaagaagggaggcgagagaggagagaattatgcatttaaacaaagacaaggaattgcgaaaatcaccatttttaaagaagtatagatttcataagaacctctgagatgatgataatgcatgataataacatgtaataacaataattataatagtattatgcttctatgagccatataaatattatatgctatacatattgctaagtgttttacaaccttcacctcatttatttccccctaaaagtctatgattttatgtaagaggaaaatgaagctccaagaaaaactttttttttttttttgagatggaatctcgttctgtcacccatgctggagtgcaatggcatgatcttggctcactgcaacagcactatcttggctcactgcaacctccgcctcccaggttcaagcaactctcctgcctcagcctcctgagtagctgggattgcaggcacccgccacctcacccagcttaattttttgtatttttagtagagatggggtttcaccatgttggccaggctggtctcgaactcctgacctcaagtgatccacctgcctcaacctgccagtgttgggattacaggcatgagccagcacacccagcccaagaaagactttttggacactatctcagggtaagggagtagcaggattgggatttacacctggatctgactctcaagctcatgctcattccactacagaaaatgacctgtttgttcaggtcttcctattaactgagatcttccatcttccaggaatgatgcagtacattccaagaaagatgtgttatggaagtgacatcagatctgaatcctgaagtcaaagtttcatttagtagaaatcaaggtaagatgaggaagtgttgggagactggactatgaagtatgaagagtctgtatcagaggctggcaaactatagttgaccatttgtttttataaataaagttctattggaacatagctagctccccttgcttatgtattgtctctggtggctttctcactacagtggcaaagttgagtaattgcgacagggaccatatggctaacaaagacaaaaatagttactatcttgctcttgacagaaaaagttttcctactcttgatctaggtcacac[133 bp omitted]gaaaccccgtatctactacaaatacaaaaattagccaggtgtggtggcaggcgcctgtaatcccagctactcgggaggctgaggcaggagaactgcttgaacctgggaggcggaggttgcagtgagctgagatcacaccactgcactccagcccgggtgacagagtgagactccatctcaaaaataaataaataaattaaataaatgcttatcctgtatgtaatgttgagccatggaaggatttggagtaggggagacacatgggcttatttcagaattacaaaaaaaccattctcagatccatcctagcacagggcactcccatgataaaggcatcaacaacacaattccaaaccatcttcacttctcaatctttcaccttgaataccatttcaacaaatattaattgagcatctagtatgcacctatactctatgtaagtggttaaagctgtaagcaagcagtaaggcttgaaacttaaagctggtggaaagtaaactgaggaagtgagctttctctttgagagatccaatggaaggaagactatgtacagaaggacagcagccagaggttgccttagaacacaaacagagctgaacttcttgaatcaagcaggttttttgggttccagtggcagaaacggactttggctagcttaaaagagaaatcactggaaggaactggcaaaggggtggagttcaaaggattaaagtgaaggctggagagtgggtttgggaaagagtgaagcctgggaaaccaagagatttctgtatcatgagccactcaacactctcacctgaaaagcattaaatctgcttcttccactcttgctttactcaattcgagatttaaagtgccaggtaagcagtctgattagcctggcttaggacaaaggttggttggctttagtgtaaaaataaggatctggtgcaaggagctttgagggaccctgcttgcttttcattatgagaaaatgggcacgtgcattaactatcccaccaggaccacatacagtggagcagaggtaattcttccaaaggaaatcagggtatagagacttagcagctaaacaagttcacaaatgtcaatcatacctgtatagattcaaatcctacctcttccaattattggctttgttgactttgggcaaagttatctcatttgcaaagagaaattataatactacccagctcttaaaattatgagctaatagatatgaagtgcttagaaccacgtctggcacatcataatcacccaattaagcttaactgctgagagtattatgattattactgcatgcttgctaaaaatagcaccaagtgatagagcccacggtgagatctaggccctcattccaaagctcccgctctttctgccaagccaagctgcctttgcagatccaacctcagttaaatgagatgataatgtgtgtgaagttgttggggcaggtgcccaaagaggatgctcaattactgtccaagactttcttcctctctccccaaagaagtgagtaggcttaggctttgctttctgcttgggagatgcccccacttttttttttttttttttttttgagatggagtctcactctgtcactgaggctggagagcagtggcgcgatctcggtgcctggttcaagcaattcttctgcctcagcctcccgagtagctaggactacaggcacctgccaccatg[180 bp omitted]gagggcccagggaaagcagacaaagaggaatgttcctggtttgtgcttactatcattctcacggcggagcccactcaggtttgttgacaatctggcccctgcctaccactctaacctctcctccctccacattcccatgagcttaccctgctccatccacaatgatcttctttctgcgtgtcaaattccttctgcttttttctgcctcggggtctttgcacaagctgttccctctgtctaagctactcttaccccagatcttcattaggatctaaactcaaatgtgaccatctcagtgaggtctctcctgacaactctagctacggcagcatctcaaccccatcggtctctaacacatggccctatttcagtttctttgcagcaatgaccagtacatgaaattatatatgtgtttgtcaatattgttgtttgtcttcctacaccagactataaactccacagggttagagaaagtgcatccccaacaccgagactgcttggttcacagagggtgcttttacacatatggctctgtcagaactgtcatagcaaccctgttaggtatatagtctattaaggctgagaggcgcttagtatcatgatttagagcagcactgtccaatatatgtagctatttagatttaccacgtagctatttagatttacatgcttcataatgaaataaaatgaaaacttcatttccttagttgcattagcgtcacctcaagtgctcagcagccgcacgtggctagtggccaccattctgggtagcacggatacaggacattcctatcactgcagaaagttctactggacagggctggtttagagcattcactgcagattcatatacttagcttcgaatcccagtcctgccaattactagtggtgtgattctgagtggaccttatgcttttagatctcacttttttcatctataaaatgacgctaataacagttcccatctcatagtgttgtaggagttattataggcaaaggctcttagaagagcatctgggatgtagtcagtgctagaaaaagtatcgactgttgctatgacacctccatttttactccctgagaaactgaggtccaaagaaaagaaatccttgtcctagtgcacacagccaggaggtggagggagctgaggtttgatcccgcacctctatgatttcagagcctggctaaatccgatgacacttttcaggtcccttctgggaaaaatccctgaaacttctgacccattgctcccttatctgtttagtgggggacagaagactccaagggctcctctatctaggatagatgtgaaggaactgactggagagccagccagagcccaggacatgggttgtctattctaggacctagtcagtggcttgggactccttgggggttgggaagccaggctgcccaggacacagaagcattggtgtggctgagccagtcatgccagctgcagccgagaccccttgtgtgggcgctgcccctgtgggtgtaatggcccctgcggcagggacagaatgctcatccctcccacctgctcaagctctgggactgccccaggaactgtacagaggggttgaactatttccacttgtttccctgtagaagcctcagatgctgctgctgctgctgctggtttaatttttaaatttagttacttttaatactttttaaatttagttacttttaatatgcacagtccctatgcttgtactgttttctttgttttgttttggtaacatgggatttttaattgctatttttagagcttttaacacatttttctacatttaaaacttttttaattgaggtaaaattcatatgatataaaattaaccattttaagtgtacaattcagtggcctttagtgcattctcgatgttgttcaaccgtcacccacatctagttttaaaacactttccttacccctcaccccatctcactaagcagccattcctctttccctccccattcctagtccccgacaaccactatctactttctgtctctaaggatttacttgttctggatattacgtatcaatggaatcatacactaggtagtcttttgtgtctggctgcttttactttgcataatattttcaaggttcacccatgttctagcatgtatcagtacttgatttctttttacagttgaataatatcctattatatggctataccacactttacccattaatctattgatggacattcgaatcatttccatattttgactctagtgaatagtgtcgctgtgaacattcgtgtgtgaatatttgtgtaattacctgttttccgtgctttcgggtacatacctaggagtggactttcagggttatacggtagccctatatttaactttttgagaaactgccaaactatcttctacaggggctataccaatttacatttccaccagcaatgtataagagctccaatttctccacatcccctcaatatactttaaaacattcacaattatatggcataataatataataattaatgataataattgttgctatcattaataggaggaaaccgaggctcagggatatagtcaattgagcaagtttatgcatctgtgaggcaggcagaataattgtccctgaagatacccacatctgactcctggaacctgggagtgtgttactctcagatgtgataaaaataagactgttaatcagctgaccttgtggggagattatcctggattactggggtaggtccaatgtaatcacaaaggatcttgtaagtgaaagagggagggaaatgggtaacagagggagacggaatgatgaaaacagagaatcagagcaatgtacggtgagaaagacttgaccggccatcgctggcctgaaaatgggagagggttggagagagatttgaagacgccatgctgttggttaggaagatgaaagaggccgaccaggagtcaggaatgtgggcagcctgtagaagctgcagaaggcaaggaaacaaattcctcctagagccggcagaaggaatgtagctttaccaaggcttttcactctatcaacccatttcagacttctcaattccagaactgtatgataataaatctatgtcgtcttaagtcacaaattttatggtaatttgttatggtagcaagaagaaactcaggccagccgtagtgtggtggggcagggattggcatccacactggattgactcaatgtctgtgattctaactgattggctgtctgtgactataacaaccaggttttttgccgtctccaggtccagcaccacttccctgctccacatagacatgagtggatctcacaaacatcacgctgggtgaaaaaaaaaaaaaagatcccagcactatgggaggccgaggtgggtggatcacgaggtcaggagttcgagaccagcctggccaacatggtgaaaccctgtctctactaaaaatacaaaaattagccaggtgtggtggcgcacgcctgtaatcccagctactcaggaggctgaggcaggagaatcgtttgaacccaggaggcggaggcttgcagtgagttgaaatcgtgccattgcaatccagcctgggcgacagggtgagaccccgtctcaataaataaataaataaatacatacatagctagcaagttgtgcaagaaagattcagtgaaacaccatttagaataaatgtaaaaacacacaaaataatattacatacgtgtactggagccagcttatgagggtcaattgttaacgttttcagttttctacatttaaaacatttttaaattgaggtaaaattcctcattttagctgcttgcctaacatagcccaatactcaaaactaaattgtataaacttgaacataaataagttataataaaaatagagtaataagcactaaaagctcatcacttcctagttgtggctccccaaacatggtggcggtggtggttggtgtggggtgggtggggcaggtgctactgtgtaattgatagggaccagagatgttgctaaatatcccacaaagcggaagacagcccccaccacaaaaacgatctagtcctaaatgtcagctgtgccaatggtgagaaatcctgatcttccctaaagcatgagttcctcatgagcaaggccagtatctgactcatctctgtccccagatcacagtctggcagagcagataatgctaaagaatattaatgatgttctacatcccaggcatttgttgcatttaaaccctagtgttatgagttagggactgtgattatatttgataaagcaaagaaacagctgtgctggtaatgaggctgctaaggaaggatggaaaatcgaaacgtaggactaatcagagaaatccaaatatgctcccccaaccaatcacaatggcctctaattaaccactgccagcttccttatgccaacggcctccaaccaggcactcttgaagccttccctttctttcactataagctttcccactaccctgcctgcctttgagtctgtgccaaacacaaatggtgtcagtggcctcccttattacagcaagctctgaattaatagcctttgcttgttttcattgggtggtctttacttccgcatagcaccggatgtgaaaagccttccacatgttttacgccttgtttcttctgctcattataacaaatcctgtagtatcacgttttcccggtgatgagttgccaggaccatgtgctcacaaaggaggggagctctgaaatatggcaaatggccaacaagaactctctcctccagcctagtctgaaggatcgctgaggtatcccctaatgtacatgagatggtccagcttgtactagggattgaaacatagatagcaccagagatggcggcaggagagagtcccctgcaagagtggacatccctccacacctggaactctttccttccaggacactacacacaaccctctgtttctatcaggcttgaaggaagtaccatagaaaccttcagagcttagatagaccagtggtctctacactctgcctttattccaggagtccagagggatactgggtcaagttcatattcccactgacagctaaagttcttgactgtcaaagcaatttctaagaattaccagtggaaacagttagttccctgtggctgctatgaaaaattattacaaacttaatggctacaacagtacaaatttactatcatacaggtgtgatatgatagtatcacattagcctggaaatatcattatcccaactttatagatcaagaaaatgaagcacagagtggttaagtaacttgctcagggtacatagctagtaagtgctagaggtaagtataaacgtagacatctttggaaaggaatatacacaaaaatgtaaaaacaatacttacttctgagtagaaatacgatagatgttgtttgcttgctttgttgtttttctgaaatttacagtacgtctaggacaggggtccacaaacgttttctataaagggccggacagtaaatattttaggccttttggcccagatggtctctgtcacaactacaaagctcagtcttgcagcctgaaagctgctgtagacaatacatagtgaaatggcatggctgtgttccaataacactttattcatggacactgaaattcacattctatataatcttcatgtcatgaaatattttcttttgttttttccctccaaccattaaaaaaggtaacaattactcttagctcataggccctacaaaaacaggaggagggcaggatttggccagcagatcataggatgacaagcatcacactcagcatgaaactgttctaaaatgttgctttaagatgaaaaagcagatacagttctttggtcagcagttggtggcgtgggcacaggtctggagacctgccagcctccaggcaggctagagggcaggtgtgggcagttagttttgtccctggagcctgggaagacggtgggtgaccagagagtcctgtctatcctaggaggagaacattcagcccaaatcccagccccatcatgcacagatcagagccatttctgaaaatgtcgctgctgattctgcttttcctgggattggcagaagcctgtactcctcgtgaaggtaatgcttccagccatgccttgtgtcctctatgtattttcttacaacttgggaggctcttgtgggctggattcagagagaagctcctgaagtctaacagacttcttcttgcttcccatttagacattcacatttcccttgatggacacagtggggtgaatgagtctaggttgctagcccctgcccttggagatacacttgtgtctgcatcctggtttctatcactgattctgtgactttggggagacactgcgtctgcaaaccttgctgtcctcatctgaccaacggggctcacaagaatccccagttcatgggactgttgcatgtcattgacgagcttacgttgtgcagtgcctggaagtcaacattaccatagttagataattctagtgagactccagacttttgcgacgtaaagacaccaaagagtatattgggaagaggacttgggtcttgccataactctgagttcccatttcctcattcgatccacaaatgtttattcctggttctttccacgggcttgatgctgggaatatagtgatgaaaatagttctgtcttcatggaattctcatgctaaacacacacattctagtgtggggattcggagatggcctctctagaaaagtcacatttgaggtaaggaataggagctggccagctgaagagttaggagagactattccaggcagagacttgaatatgcaaaggtcctggggcagaaggcactgagtccctccatcagagagaggccggtgtgtcaggaacgtggtaggcagaaggaggggcatggtggtgagactgttacaagtaagaagagacaggaggcaggaaacagaacagacgggggcatgtgagtcacaggaaaaatgttggatgttatcctcagggaaaaggaagctgtgaaagggttttcagcaaaggagtgtcatatttaggagcgtgtgtgtgcatgtatgtgtgtttctgtgtgtttaaacaatgtgtcttgccctcaggaaagaatggattaggtgggaatcagattaggggcaaacacacaagttagaaaacgttttggtcatcagggtgaagatggggataagtagaaggttacgaggcactgaggaaacagctcacaggattgagtgatgggtcagatgctggtggttggggatagagaagcatgcagaaaggctctctttatacatacatgtatttgcaactggggaattgaggctgcccttaactgagatgagaaaactctgtagaggtcgggcgcggtggctcacacctgtaatcccagcactttgggaagccaaggcagctggattatttgaggtcagaagctcaagaccagcctggccaacatggcgaaaccccatctctactaaaaatacaaaaattatccaggcatggtagtaggggcctgtaatcccagctactcaggaagctgaggcaggaaaatcgcttgaactcaggaggtggaggttgcagtgagccgagatcctgccattgcactccagcctgggaaacagagcaagactctgtttcaaaaagaaaaaaagaaaaaaaaaaaaactctgtagaggaacacgttttttaaaaaatttattttgaaattattttagacttgaggaaaagtcacaaaaattaagtttctgaatattcttcacccagttatctcagctgttaacatcttacctaaccatagcacaatgactaaaagcaagacccaacaccagaacaaaactattaaagaaattacagacctcattcaaattttactaatgtttctactaatagaaaaactattctatttgaggatccaatccaggatcccaccttgtattttcaattaagttttttgttttgttttgttttgttttgtttcagaaaatccagctcttgctcaaccatgttgcattttgttatcccatctcctttggtcttgtgatttgtccttaggatgtgtgattgaacctcctcaatctttgtctttcacgaccctgaaacatttgaagagctctgatcagttgttttgcagaatttctctcaatttgggtttgtctgaagctttctcatgattggattgagactatgcatttagggcaggaataccacagaagtggtctcacacccttccccgggaattatatcagggaccacatgatgttgatgtgtcttattacccatggtgtaaactttagtccctcggctaaggtggtgtctgccaggtttctccactgttaagttactattttccccctttgtaattaataaatacgctgggggagaaattttgaggctatgcgaataccctgttctcctccaatttttgcccattaattttagcatccatctgtggatcttgctgcagaaatgattgctacagtgcttctccaatggtgattttctattccccttattcatctacatatattcaatggcctttctctgtaaggaaaagctgacttttcttctccatttatttattcaagtactgtatttatttatatcagcgtgaactcagggatatttatcgtattggttgggtgcagtggctcaagcctttaatcccagcacttcgggaggccaacgcaagaggatcacttgaggccaggagtttgagaccagcctgggcaacatagtgagactcatctctacaaaaaatagtaagaataaataaaaagtattgcattaacagattattttttgatggataggagtgtgatgaccacagattcttttttgaacaggctaagcttgaagcacctgtaagatgtttgggacatccatagatagcaagttctgtgagaacagagtttggggtgtctagtgtactcttataccagaacttctcttcccaatcagccttgcaaatacctacagagcaggggctgaatctgatttatctgcgtctccaacaccaaacatgggccaatgcccagagcatgtaccatgtgaatgttggttggatggatgatgaacgaatggacttatcgatggatggatgggctgatagatgggcccgagtagctttattgatagcagtgagtgggtcagctgatctccagggacacttctatctctggtcttcttggttattgcactgatctgagtctaatgctaatttctctctctgctccctgctcccgttgtgaactggctggctgatgcttttgtctccagttgcaactaaagaaaaaagtaagaaccgtggaacccccaagtctgtattttcatagctacctctcctaaaattcttttcgatcttgcaacctctctggcaattctggggaagggtggcacttggatctggtgcacagacctgccatggggtctggacatgactcagaaaagcaaacctattgtttgcttacagtgatgctcacaactaaaagagcagccctccttcactcctttgtctggggaagagaggcctattcggaaaatgaagagcatttatcagggaagagagacttcgggcagatctccattagaataacaccttggcttatgtttaacaccagctggtggtttgcaaacttcatggtcttagggccactgaacacgcgaaaaaaattattaaggatctaaagagctctttttttttttttccagtgagggttatttttatttatttatttatttttgagacgagcctcgctctgtcgcccaggctggagtgtagtggtgcgatctgggttcactgcaacctctgcctcctgggttcaagcgattctcctgcctcagcctcccgagtagctgggactacaggctgcgcgccaccatgcccggctaattttgtattttcagtatagacggggtttca[131 bp omitted]ttgtaaattcaaggatttttaacttaaaaatatttatatttacaaatattataaatatttacaaatacaaatacttatatttacaaaaactatttctatttacaaataagcacataaaaagatgctcaacctcattagccatcagaaaaatggaagccaaagccacagtgaggtatcacttcacactaactaacgtggagaaatcagaaccctcatatgctgctggtgggaatgtgaaatgatacagctgctttggaaaacagtctggctgttcctcaaaatgttaaacactgagttactcagcaattccgctctaggtatgtgcccaagataaatgaaacgtaagtccacacaaaaacccatgcacaaatgttcacagcagcactattcctaagagctagcaagtgaaggtaatcctagcatgcatccattaatgaatggagaaacagagtgtggtctatgcatacaatggaatattattcacccataaaaagaaacaaagttctgatgcattcaacatcgtgtgtgagccttgaaaacattattctcagtgaaagatgccagtgataaaagatcacatattacctgattccgtttaccgtatatgaaatattcaggataggcaaatccatagagacacaatggacattagtgatttccagggggtgaggggtgggggaatttagagacaatgactaaggggttcagggtttattttggggtgattaaagcctctaaaactggtgtagtgatggtcgtacaagtctgagtatcctacaaaccactgaaatgggtgaattgcatggtatgtgaattatatctcagtaaagctattattcaaatatctattactgcattaaaaaaataaggataatagagactcagaaggaaggagggtggcagggaggtgagggatgaaaactaccttttgggtacaatgtacattacaaagatgctggtgcactaaaatcctagacttcaccactgcacaattcatccatgtcaccaaaaaccacttgtacccctaaagctactgaaattaaaaatatttgaaaaataaggataataaatatacatactgacataaataaaatgttttagtgaaatggctgtttccaaaccaaaaaagtttagtaagaaaggtattattttacatttttgcaaatctctttgatgtctagtttaatagaaaacagctgaattctcatttctgcttcagtctgtcacaatgtgctattttttttttttttagctttatgtgtttgtttattttggagacgtagtcttgctctgtcgcccaggctggaatacagtggcacggtctcggctcgccatgacatctgcctcctgggttcaagcaattatcttgcctcagcatccgaagtagcctcccaagtagctgggactataggtgcatgccaccatgcctggctaatttttgtatatttaggagagacaaggtttcaccatgtt[132 bp omitted]atctcacacagataaggagttggaaaagggaagatcatgcagacccgttttaggcagagttctccagagagacagaaccatgaagatatacatatagatacatatatagataaagatattgatagagatatttgagaacaaatttcttaggggaattagctcactcagttgtggggtctgcaagctgcagaaccaggagggccagtagtgtggctcagtccaagtctgaaggcctcagaaccaaggaagctgatggatggtctaactaactctcagtctgaggccaatggcctgggagctcagggagctgttggttcaagtcctagaatcccaaaagctggagtacctggagttctgacatccaaagccaggagaagggcatcccagctgcagaagggagagcaagaattgacccttactccacctcttggcttcagctgggcctccatccaactggatggtgctcacccaccgtgagggtggatcttccctacctagtcttccaactcacaccccaatatcctccagaaacaccttcacagacacacctggggcagcccaaacattctaatcaaatgccaaaccactcaggcttccctttcagcagaagacggatggactcagtgcctactgaagcattgagaataaacgtcttactgctatatgggtgccttagtcaagctgacaccccaaatcaaccatcacatcccctgaaaggatctcagggaccacctcccacccccaccaagtagtctttggatgatacttcgagaatttctgctccaagtcacatggaagggaaaaagatctcttttttttccacccctactagactgcaagactgtaagttcctagagggcagggactgtactttactcaatctgtttattcctatagcctagcaaaattcctagcgctcagtaggactaaataaatggaaagagccttgcaaaatggaaaggactgtgagaacataatttaatgctattatttcaggttgaaaggagataaaaggatccaatattaattaagcatttagcatgtactgagaatttaaaatacgtcatgcaatttaattttcaaaatcgtaagtgtcccatatggggtctgaggtttccaaagctctgaatcctcacactggaccatcatcatgagaatcacatgggaaactttaaaaatatttaatccccacaccagacttggtgagctaaaatgcctgcagataacattttgggttttttatacctaaaaagctagcctatgttagttccttcctatcttcaaaagctgaaccttctaaacctaaacaaatgcaaacatctcatgatccacactgtttttgtttcaatttaaaatattatgctgttttaattaaaatgttttatgttaaattattttattaatatttcaattaacaaaacagtatttacataaactttaattacatttaaattactaattaattattcaatttaaaacatcatgttattttcatttaaaataagatttccagggttcagaattaaagaagttctcaaggttatactggaaaaaactccttcccaacctattcactcatttcccttccccgaaagaatctgatattaattatttcttccagatccttccagagatattttatgcaagtagaaacaaatgtgtatttatatattcaaagtcctcttgtttctatttttacaaaaaagacagcgtattatacacactgttctgtatgcaccttacttttttcacctaataatacttccagaagatgactctgtgtcagttcataaggagcatcctcaacctcttatttatacgtttttggctgaataatatttcttgtatggaagtccacaatttgtttgaccagtcacatactaatggccactcaggttgttttcagtagtttgctcttttaaataatccttcaaagaaaaattcagcttacatgaaattagacatataggatatatatcaatgtagatctacatatttatatctgtaggattatacatggaaatatgtagaattatatctatatatagatatatatttctttatcatctagatataaccactgtcgtagtctgttttgggctgccataacagaatacctgagactggataatttataatgaatagaaatttattggctcatgtttctggaggctgagaagtccaagattgaggggttggcatcttgtgagagccttcctgttgtgtcatcctatgatcaaaggacagagagagagacagaaacagagacagagagctcagagcttcaagcccttttataaccagcatttatctattcatgaaagttgagcccttgtgacctaaatacctcccattaggccccacctcccaacactgctgcatttgggattaagtttccaacacatgctgtttggggtacacactcaaaccataacacatacacatttgacccttgaacaatgtgagagttaggggcaccaacctccagtgcagttgaaaattcacatataacttttgacttccccaaaacttaactacgaatagcctactgttgaccagaagacttactaataacataaacagtagattaacatatattttgtatgttacatatattacatgctgattcttacaataagggaagctagagaaaagaaaatgttattaagaaagagaaaatatgtttactcttcattaagtggaagtggatcattatcaaggtcttcatccttgtcatcttcacaatgagtaggctgaccagaagaaggaaggggaggggttggtctttctgtctcaggggtggcagaggcagaagaaaatgcacatctaagtggataagtgtaaccatgtagttcaaacctgtattgttcaagggtcaacggtgtgtgtatgtacacatatacatttacatatttatataaatatatatctgtaagattaatttctgaaactgcaaagttaaagaagggtttctaacactcgtgccactacaatgctatcgctgtattgatctttgtcaaatttatgtgacaaactacataaaaatagcgtcccatataaagatcgcactccatataacaacaggcaaataaatgttccatgaaggaataaagaaatgcatgtaaaaattaacagagatggatgatgttaatattaattccactctcttccttgaattttccatgttgattcactggctcctggctctgctgccccttccagtcaactgtaagtcatatctccttctccctacataaatggggagcccgcccttcaacctagagaaggaagggaatgaaagagagaggcaaaactgctgacgatcacattcaacctggggcagattcagatgtcctcaattcaaacatgacctcttcacccagaatctgcagattgcccggggtgggaacggtgcaactggatggactttgaggaggccaacaagcctctgtcattaggtctaaaactgggtgtgctgtcagagagaaagagaacctgtgtggtgttctgggaaatagctttgatcagattttcagtaggatcaatgacctaccacaatctaggggcctttgctctagaatgtacacctgggttagattgtgtgtatttattggtgggttttagatgagaaaaatatggtacagggtgggtaagacgtcttcctttcccagaattaacatccagtctccggttgagaagtggagatgacacttggttattatggagaccttccttatgctagaaattcagctggagaagggagggtctggattccccaggccactggtacccctgaagtttctgacttcagggtaaatgtgcctccaaaggggtccaatgcacttagaatgaattgcagctccccattctggttccctaacctatctcaggacctatggggtgcaatgaggtaccaaggatgacttaattcctttcatattctctctgaaccttcattggcaatatggttcccactggctaccatcggtcctgtccttcctgctgcttgtctgccaacagtgctgaaaggtaagcttctcattccatctctttccctttggggtctgtttgcctttgtccaaaagggatcattgctgctgaacttcgacttacgtttcttctctggtctgttcacagcttagcttctaatagcggaactagtaaaaccaagtgtggaattgtcctttgatgaacaacaacaacaacaaaagcccttttacttgtctcccctcaaagccacttgtccagaaactgagcactctttcatggtccgcacatggctcaaggaaagctattaggtctgagagctcaattcaggtctacctgacatcgataataatatttggttagacacaatgacttacatctttgctttctgaggtcaggtagtaaaagccaccatcatcgctgcctatttaataattcctagagatagcaatctggaacaagttaggtggaatgagaccatggctttgtcactgagtttgcaagactctggggcagaaggctaggtcaggaagtgagatgatgacttgcagaaaggggacaaggcccacattaggcacctttgcattcggagcctaattctgctccttcctaggtggggcaatcttagagaagtcacttcacctctctgtgcctactttgcaaggttaagtgaacttacggttgcaaaacattttcaactccataaatccagactttaccacctctttctgattccacgtccctgctcccactgcacacacacacgtacacacccttatgtatgaatccaatactattatcatcattattattattacgtacttcatattactatttctaactttactaaatgttaccttgagccaggagctaggctaagtactcaatctgcattatcttccttctttattgacacagatccaaacaggaaacaatatctccattttaaagagcacagagagttcattcatcatcccaaggccacccacttagtaaaatgtatagcctggatatcagccattcaatgcccacatcaatattcccaacaacgttaggcattaactaccagacgattttcagtgataccgagaaaggtgttgcgagctccataaatacagcactttccactagcaaacccagtgggattcttcaatacgtagcaagcctcgccccagttaacgttcccgttttgcagatgaggaaatggagacttctagaagaagtcagagagatctgagtttgagttcctgctttttcactcaccagctgcacaggtctctgcaaatcacgtaattccttggaggttcacccgtcctcaccagcaacatagggacaatatctgatctcaaagggctggtgtggggtaaatagaaggacagagcttggctcctctttctagaggcaataaaggatcatcttttcttctgttcctagcatgaatgaagaacggttcatgattactgtcccaacctctttctccactttggacgctcttccctgcatcaaatgcacgagggtcctcaataatctcacagcgttctgagtcttagtccctgactgctcaccatgcatgaccccttgtggattctacttcccaatctgttcccagcccccagcatctgacctcgtttttggttttctaattatggcttcgtctttgtgacctcttggggacaacattctggaccacgcatgtaaccttggccaccatgctgactctcctggatgggctgccatcagggatcataggtaagtaccttgccacttcacaatgcccccagactgtgcactttggcgggaaattttgggctttgctctagaatgtacaactgggttagattgtgtgtattcattggtgggttttagatgataaaaatatggtgcaaggattttgtgcaagaatttctgagtatctagtctgtgcctggactcatgcttgggtgatgggagcccagaagtggatctgatatgctcattctttataaactcaaagtctggtgggaaacagagataagtaaacagaaattagattagagacaagtgatgcttgctgtaatttttttttttttttttttttgagacagtcttgctctgtcactcaggctggagtgcagtggcacaattgtaggtcactgcagcctctgcctcccgggttcatgccattctccaacctcagcctcctgagtagctgggattacaggcacccaccaccatgtctgcctaatttttgtatttttagtagaaatgggtttggccatgttgtccaggctggtcttgaactcctgacctcaggtgatccacccacctcagcccccaaagtgctaggattacaggcctgagccactgcgcctggccttgctatgattgatagaggtaggaaaggggattaagtgggaataatgaggcatcatgactgaggcattatagccacacttcctgaagaagagtttgttacatctgttgaactgggagaaatccattaattaggcatatttctttctgctgcatttgcacatcatgtgttatgtcttcttcctcaggtctcatgagcagactgtcaccggatggtaagtgtcaggattgtatcttttaaacctggtctttctcttgtccgcaaggtaatgtagacttattgagtcatttatgcttttaggtagagtctaaagaacacttcaggtattatccaagcacatgttttgtttgaactttgatgtaatgaaaatctttattgctatataaggttacagctagaattttgcctaataattattatgctgtggagttttttaagttttataaatagcatatgcacatgggaaaatatcgaggaaacataaaatgaaagtcaaaatcattctcttcaccacattcccggctctgctctctagaagcaagcaccatttctagtctcacgtgtattctccccagaaatagtcatacacatgtatgtacatccttaactcttcaagttaaaagtactatgtgttttagtgatataactttacctctttcaaatacctgagaaatgcttcgtgtgtactcccataatttaatgagcctctggttcatgtacatttagttttttttctaatatatatgtttttagttgtttcctttcaccccattgactgggattcctaacatattttgatttgttttgtttgttttaatttttaaattattattattatttttgtatttttagtagagacagaatttcactatgtcggccaggctggtctcgaactcctgacctcgtgatccgcccgccttggcctcccaaagtgctgggattacaggcatgagccatcacgcccagcccagttttgttttattttgttttgatgttattataaacagcgctataatggaaatccttatccagtcattgcttttttatttttgcaaattcctatctgttaagttcctaaaagggaaatggctgggtcaaagggtatctgccttttaaatctggacagatgtttaacaaatttgcatcttcatatacagcctgtggggatgcttgtttccccacaccttcagcagcatgggatattatctaactttttatttatttatttagagacggagtctcgctctgttgcccaggctggagtgcagtggtgagatctcagctcattgcaacctccgcctcccgggttcaagcgattctcctgcctcagcctcccgagtagctgggactacaggcgcccaccaccatgctcggctaatttttgtattattagtagagatggggtttcaccatgttggccaggctggtcttgaactcctgaccttgtgatcctcctgcctcggcctcccaaagtgctggaattacaggtgtgagccccgcacctgacccaaactttttatttttgataatgtggtggccaaaaaacactgccccccatatttttttcacagacggactgaaccccaacaggtgttcttgctgcatctatgcaccgccagaacccccacacctcccattcttcaaatggacgtacagctttctccttaagtcaataaacttgaaaaagttgctttataccgcttgagtaagtggtcagcctcataaggaggagacaactgtgaagataaatatcatgaaaacaaaacgagattaaattataactagacactgttttctgccaaggctctttgtgtgaaggttgttcccgctgttcggtggaaataaacactagcaagtgttatgagttaaagatgcgttagtgccattttgagaatttctctctggttgaaagagaattggagagagaaaacctttctcaccatgtggtacccaaggagttcaagctgaatctgtgtccacgtgagatctgctcggcgtcactaagcactcatctctcactgctagagatgcccggcagagcgaatgctagtggggcttcccaatacatccatatctggaatttccacctggctccactatttaccagcacacaccacccaggacaagtctgttttcttcccggtaaaccaggattcacagcacgcactgcacagtgtggttgtgagattatgataaaatgccagaaacactcagatattagggagctggtgaaagtggatttgactccttcccacccccaccattccatggattctggagtctaaagtcttccttgtggtttctgttactcctgtgatgacagtttccgagttttgtccatcttaggtggtgaaaccaccatgcactttctctgttttcccatcaacctggaagtagaactctcctccttgcccatcgacctggaagtagaactctcctccgggggttcccccaagaaatgtgttgtgggaaacattttacggaaacctatgactgagttttgatggagaatgtcaggaacagtcagtccagcctcgagcacatggttcctcaccttaccaactctgctcacctctccttttcttcccttcccgcctctcctccctcccacattgcctgcggagctacacagtcttctccttttaacaagcacaataattcagttctcccccactcccatccccccaagtccacctaacccataaatatcagccctctgtgcaccaggagcttcctccttggaatgcagccggactttataaaaagcaaaatgttcttattccacatgtgaagtgcctgccacgaaaccaagtaccaatcgaatgtagccactgtcaggtataataacggcagggggttgaggcagatgtggaggaagtcacagactcatggggctagaaatcatctgagtcattaaacaggtggggaaactgagggctggaaggaggcagagcatcagaggcaaggtggccactaacagtagattcattcagcaccttaaatcagccaatgaatttccaagtatccctttgcatggattcttttaatccttataagccctctaagaggtgtaaatgccacaaaagctacagtgaccagctcgtcccaggacacttccagtgttagctctgaaactctcgcatcctgggaaccccttcagttctgggcagaccaggagcgtgggtctctcatttatgattccacttttctgatgaggagactgaggcacaaggagatggagtgagttgctgatggtcacgaggctggtgtggcagagccaagaagggagcacaggcccaaatgggtccatggtgtccgctgttcttaggatgaaggctgaggcccttaagctgacccacaggggtctgcctcactgagctccagatactctccagccacgtcttgtaccatgatcacctaccatcatgcccctgaggtgggctccttcaagcccccggcagctgcaggctccatccagcccaggaagacgcccacatcgttccctctgtctgcgacactttcctgcctcctcttccaaatttcttcacccagctaacccctgctcatcttccaggtctcagacacaacatcacttccctcaagatgcctcccctggtgtccccgcaaggttagcaaccatcacccccttataggttcccatggaacccagcaggtctacccagaatactcatcccaacgataccccacttttgatgcttttgctgtctgcttctctctgactagtctgtgagctccctgagcagctgggtctggcctgccttgctttccactgcaccctccataccttgcgtgatgcccagcacacaggagatgcctcataaacatttgttagaaggcgtgactgagtgcttaagtctgtgtcttcacccgtaaaatgagtgaattgggttgcctcatctccagtagcatttccacctctgctctcctctgactggtcagggatgcttagtcagtggtgtctgagacccgtgtcttaatgttgatttctctctctactctgcccctccgttgcaacctgggctgcctacattctagcctccagataggacagaagaagaaagtaagtactgtgacagtttttgtctctgaaattagattctcataaccaccgctgggccttcaaactcctttaagaaaatgccagggaagggttggtccaggccccagtgtttagccattcgcctggcatcaggagcatcatcagtacagattctgccaaagaatctaagctatgctgtgctggtaaatgtctaacaaccacctctgcaaggggagagtgggaaagggagccctggtttgtagcgactaccacttcccatggtgtaaatactctgaccatgcctgatttcaggatgctaagggtctgagagctgcattggacaattcctaaattttagtaattgtctcttgtaagctagcttcagcacctcactaagtgtaagctatgtctttttttatttggtgtagaaattgctccaatgcgagggagcttaccccattcattcctccaaaggaaaagtgatagtctggaggagagaaaggggccaggccctttacagaggggaggggaaatttcaaggaagaaagatggtggagcagtctcttcggaagacagacgtatttatactctagttcgggtaagacggagagagacccctcttcccatgagtactgatcctcgaggccaaagacttgtccatcttttagtacatgtcctagaaaactgtatggcacatagttggaccacacaaatgtttctcttgtgtgtggtggtctgtttgtttgtttttgggtttttttgagatgggttctcactttgttgcccaggttggagtgcagtagtgcaatcatagcttactgcaacttagaccccccaggctcaagcaatcctcctgcctcagcctcctgagtagctgagactacaggtgcacaccaccatacccagctaatattttacatttttgtagagacagggtctcaccatgttgctcaggctgatcttgaactcttgggctcaagcaatcttcccatctcagcctgccaaagtgctgggattacaggcaggagccaccacttctgaccctcacaaatgtttcttgtacctctaattcatgttatttttgctcattagaaggagttgaagaaaacgaatactggagaacctgcctctattatataactgaattctcccaagagcactggtcaaatggaacccaagttataaagagtggtttccccaaactggctaattatctgaaactttttcaaaaagacagatttctttgttctacctggaccttctgcatgagaataccaaggggtgggtcccaggaatctgtcctttcaaaaggtttctcaggtgcttctgatggtttggctcagatggtttgagaactactgagataaagtaggactcagcagaaaggcccactgcttgtttttataaataaagttttactgacacacaatcacacccattcatttaggtattatttgtagttgtctttgtgctctaatggcagagctgcatagttgtgactggggccatgtggcctgcaaagcctacactatttactgtctgaccctttagaggtcagacatttattgacctctgagctagagcagtgcttctcagggtctttgtttaaaattagggcctaggaccctacttcatatctaaagaaggaggatgtctgtgatggaactctaagctcttgagtttgcttcccaaatggtgattctttgggttggacacggtggctcatgcctataatcccagcactttgggaggctgtggtgggaggaaggcttgagcccaggagtttaagatcagcctgggcaacataggaagacccccttctctatgaaatataaatacataaacagtttaaaatagttttacgatattgaatggaggaataattgaatgtcctatactgctgattctattctcttgctcactcttctccacactgactccccgaatgctggttctgctacttcctccagtaaaaagtaagttatttttcctttcctatgggtcacttggaagttttcaggtgctgggaagaagaggcaactatccaaagaagggaatctttggatagttcttctcaatgtagaacacaagttgagagggaccctccatctgctgctcccctctctgaaggggtttcagggtgggctgcaagccccagattgtgtggagagccgtgagggtgtgtctgggatacggtgggtctggggctacatgcaggactgagtatgtgagcccttggcatatcacgtccccgagctcacaggaccgttgccccagaagacaagaaagcattgagttgtacatatttgttgggagggccattgagaagagaaccaaagaggggcaccttgctccttcctcaagctccctcctgaccctcgggggagaaatgagagagaaccctggagactcaaagggatgctctagtatcttcctaatctctggaagatgaatccccacggaaactgaatacctggggcttctgtccacctggattaatgcgtctctaaaggagtaaagtctcaaagaagcatctcgagtcacccaccctgggccccagcctatcgcattaatctggaagacactttatttctcttttttgggaagatctgttttgagaaccacagggtgggaggagctaggaagaaggcgttattaatttcttccttttcctctcctctccttccttccttcctccactgctgcccaacaatgcccactggatcttctgctcctggcatctcatctcaacagcactgaaacctaagagtcttgtttcacatttgaccccttctgttttgctcctgttctcatctctgccaagggaggtccactcttagccatggatcaactctcagcttttgaccatcttttttttttaaactcaagaactgggaaaaaatagctatattaccatcatcttcaaatagatgggatgtctcatggaaaccaatccctcctcgaatcaggcattcatgtaatgccatgatgaggatggtgatgacagtgatggaaatttacaaagagctttctaggtgccaggcgcgaggcaccagagcagcacttttcaatgtgttatgtgtagttattccccacaacttcttcacaaggcaagtattattcatctgcacttgactgaggtataaaggttaggtaactagatcaagactgggcatcccagtggtgacggtgggttacggatcctgggctgcgtgactcagctgcttaaccacggtgctgtgcttcctcccactgctgtgtggctcagacttattttccccaagaacatctctgaccatttcatcatgctgttccctgaaaaagtcactgtttgccacatgtgggtaacatacatcttttaaaaagtcttgaaattgtagtaaaatatacaaaacatgaaatttaccattgtaacttgttttcattttttagagacaggatcttgctctgttgtccaggctggagcacagtggtgcagacctcctgggctcaagcgatccttctttcttagcctcctgaggaactgggactacaggtgtgcatcatcacacctagctaattatttttggtttttttgtctgtttttactttttttttttttacttttttgttttgctttgttgccaaggctggtcttcaattccggggctcaagcaatcctcctacctcagcctcccaaagcactgggatcacaggcacgagccactgcacccaccttaaccactttaaagtgtgcgatttagtggcccttggtacacacacaatggtgtgcaaccatcaccactgactccagaactttataatcactgccccaccaaaaaaaaagtacccattaaacagtcagtccccattctccctctgacctcagccccggcaaccaccatttcactttctgtctctgcaagtttgaggattctaggtacctcatagaagtagaatcgtacacgatgtggtcttttgtgtctggcttcatcactcagcacagtgtcctcaaggttcagccacattgtggcctgtgacagtgcttcactccttttcatggctgagcaatactccattgcatggatagactgcattttttaatccaatcatccactgattgaattttgggttgattctacctttcggctgaggacacactcttcttttggtccacattcaaagccatctaaaccccagttctgagacaccatcctgtccatgccccacacccacctccaaaccccacttctatgcagcttgagcctcagtgaaacccaagacatcctgatctgaaaaaacaaattgaaaaatggtatcctgcagctcaagagcacgttctgggtaccaggcatggttgttaagtgcttgactcatgacagtccccaagtcatcgtccttgttttacaactgaaaacactgtggtaagagagggagagtcgcttgctcatggtcacacagccagtcaggtgcagagaataacttaagcccagtctggatcccaaacggtgctattaaacaatgcaaactcaaaagtgttcaaagcggctcagactaacgaggtccctgcctcatccctacactggaagtattatcattataattgtatgttgtatatattgtaaggaagataaaattatgctaagaaagggaaagaggaactggcagagagtgtgcactgtgggcgccggtcctgactgcaccactttctagttccgtgggcttcggaccctcgcctcctgaagggctcaggcccctggtcggtacaatgcacataatagttccagcctcatatggttgtgaggagtaaacaggatcatgcacttggcaggatgattcccaattggggagatttcgcccctcaggggacacctggcaatgcctagagatatttttggttgtgaggactcagggaggtggtaggggaggctaacggcatctaatggggggagtctcgagatgttgctacacatcctacaatgcacaggacaccccacccccacaacaaaaaaactatccagccccaaatgtcactcgtctggaggttgagaaaccccccgctgaataaaatgtctggcacgggataagagctcagcaagggtctgtgaggaccacctcatttacctttgttctgaacactcccatgtctgcaggaggcccctctgccttgctcctttcgctccttttcccaggcccttctccagcctccgtcctcatgctgcactgacagcactttgcaaactgaaagcagacccagcaggaaaatcccaaacacctgcctaagggcccaccaggtgccaagcagacccagccctgctccagtaacgagcaaaagccaaacccagcaggaaaatcccaaacacctgcctaagggcccaccaggtgccaagctctgtactgggcgattcacgtgggctctttctcccggaccctcacattaacccaggatgcaagtggttcggtggagacagcctgagttttaaggcaaagaggcctgggtgggaactctactcccatcatctataatgtgggcgtaacttacccaaactcccttagattctattttcctacctgattaatggagataatattttttgcttgtttgagaattcagtgacataaggcagggatcaatcagcatttttttttctgttttctgtaaagcgctaaatagtaaacatcttaggctttcagggccaggtggtctctgctgccactcactactcaatgctgcctttgtggcctgaaagcagccacagacaacacacagtgaatgggcatggctgtgtgccaataaaactttatttacaaaagcagtagacaacacattgtgaatgggcatggctctgttccaataaaacttcatctacaaaagcaagtgtcaggatgtccacccaccgatgaatgggtaaataaaatgtgtctattcatacaatggaatgttattcagccacaaagaaagtgctgacacaggacacaacataaacgcgccttgaaaacacagtgctcagtcaaagaagccagacacaaaagcacatagggtatgactctgtctctacgacatgtccacagcaggcaagtccacagatagggaaagcagcttagtggttgcctaggaccgcgggagaggggggtgagcccagagagatggggagtgactgctcaggggcaccaggtttggaggcaatggccaacgggtacacggtttctttttcaggtgatgaaaacgttctaaaattgtttgtggtgatggatgcacagctttgtgaatgtcctaaaaactactgtcttgtacacttgatgggtgagtcataagttatgtgaattatattaatataccagtcaagttgttattaaaaaacaaagttcagaaaacaacaacgggtggtgggatggaatgtgccacccctggatgagtatgtaggtgcctacattagagtgacacaaaatacatggaaaaaaggcctggcatggtagctcacacctgtaatcccagcactttgggaggctgatgcgggcggatcacctcaggtcaggagttctagaccagcctggccaacgtggtgaaacctccgtttctactaaaaatacaaaaattagccgggtgtggttgcgggtgcctgtgctcccagctactcaggaggctgaggcaggagaatcgcttgaacccgggaggcagaagttgcagtgagccgagatcgtcccactgcaccccagtctgggcaacagagcaagactccgtctaaaaaacaaaaaacaaaacaaaacaaaaacaaacagaagagatgggaatggcgtggcggcttccttcccagcctaaccttgctgcggtgcaaatcctgcaagtcactgcacgtccctccaacccacacgaagcagcctctgactgttctgcgctgttcactgtggcatgtcctgactactcagcacgacccacccagggctccgctctcctgtgctcccatcgctctgtcttctgatgttgtgatttttccctacatgtggcctcctcttccacggctcctgggaactccatactctgggcctgtctgctcccctgacctgtcttgcttcctggaccccatctccttctggatggacatcatcagagatcctaggtgacacctcactccatgcctgccccgggactctgtaggaagctggtttgggaggaatgctttttagggctgggcagggtggtggaaagctgaaagatggatctgacaagctcacaccctcacgtcaactcacagtctagtggaggtggggagatggaaaagtaacaggcagttaaactacaacaggaatctgtgtggcacaggggggaggtggcagtggggacagtgtgcaagaggacgatgcgggcaatccagcagggcttctcggaggaggagtggcttggggcgagcctgctggacctgctggtctggaagtgtttatcatgctgtcccttctgactcgcgttgtatgcccctgtcctccttaggcttgctgagcctccaagtactgcatggtaagtctggtgactgctatttcgtgttcactcctgtgcacagaaatatacaggtactggttttttctatggtggggggtcccttaaatatcatcagaccctacactctttatccgtatcatcatctgcatcataaatgtttaacatgtttttatttgtccaacagatattaactgatgttagctctcctgtaccaaatgttattctaggtgttagagatgcagcagaggataaaacagacagaagtctgtgaccaagtgaaacttgtattccaatcagaggagaaaaaacaaagagcagtagttataggtctgctgaaggctattatgtcctatggagacaatagagtaatggggatggaaacgcagtgcgggaaacttaagttttttggctgggcatggtggctcatgcctgtaatcccagcactttgggaggccgacgtgggtggatcacctgaggtcagaagttcgagaccagcctggccaacatggtgaaactccgtctctactaaaatacaaacaattattttgaaacaaattttgtaaacatagaaaaaattagctgggcatggtggtgtgcacctgtaatcctagctactcgggaggttgaggcaggaaaatcacttgaacctgggaagcagtggttgcagtgagccgagatcatgccattgcactccagcctgggtgacaagagcaaaactctgtctcaaaaaaaaaaagtttttaaagggcgatcagggaacatgacatgtgagcaaaggcttgaagaagaagggcaggtgagccagagataactgggggaaaggcattccaggaagagagaacagtatatgcaaaggccctgaggcagctgagtccctgggatccagggacacagggagactaactttattctcttctctcctcattcgaggcacctggaagcactatttagagtttggtctccacccacttcataattcacctgatggtttcttttcttttcctttcttttctcctcctcttcctcttcctccctccctctctccctccctttcttcctttcctcttcctcttcctccctccctctctccctccctttcttcctttcctcttcctccttctcttcctgcttctttttctcctccatctcttcatttttagaagaaacaagtggctgcaaggaggaaggtaagtgcttggggtcgtaccattcctcatctataagacagtgtgtcccttctgtctgggctatgataaagccttagaagagaagatttcaggtaatcaaggccctgcaggggctttggtacctgagaggctgccttcctgaagggcatccaaagtctgcaagccactgcccctttcacactgctcatgggcatcgaggagacccaacatactgagatgtgagtgggagacatttctatcccagctgctgcttctgtggactgtgagtcctctcttcccgacatggaaattaccaagctaagtcctgggtgataggactgagggccggaaaaccagaaaatagcagcaagccaccaagtgatccagatggtggagatgagcgttttaaagtaggcagagccgggcatggtggcagcacctgtggtcccagctacccgggaggctgaggcaggaggattatttgagctggggaggtggaggctgcagtgagccgtgattgtgccaccgcatccggcctgggtaactgagcaagtctcaaaaaaaaaaaaaaaagccagaacaacactaatggttggttcttttgaaaagcgtaatacaaatttaatcctctagcattactgacaagaaaaaatagaggagaaacaaactgccaatatttggaaggaagaagagagtatcatagcagatcttgcaggtaacaaaataacaataaggtgatcattggagaaactttatgccaataaaattgaaagtttagataaaacggacaaaatcccaaaaaaacacaaattaccaaaaacaaatgaaatgatataaaaaatctgggctgggcgcggtggctcacatctgtaatcccagcattctgggaggccgaggcaggcggatc[136 bp omitted]gaggcaggagaatcacttgaacctgggaggcggaagctgcagtgagctgagatcgtgccactgtactccagactggcaacagagcaagactccatctcaaaaaaaaaaaaaaaatctgaataatcctctatctattaaagaaatgccacctgtaattaaatagccttaccacacacaaaaaagtctttcaggatcaagttagctttaatagtgaattaaaaggaagaaatcacattgatcttacaggaaatcttccagaaaattaaaaacagtcatttcccaactcggttttaggacagaataaccttgataaaagatctgacaaatacgacaaaggaaaatttcaggccaatcttcctcataaatatagatggaaaatcctagactaaatattagcaagtgcaatttggcaatacatgttaaacaatcatgactaaattcactttattccagcaatgcgacaatggtttaataggtaaaaacaaatatatggtattcccaccttattaacataaaagaaaacaagcacattatcatttcagtagatacagaaaaagaatatggtaagattttacagcttacattattttttttttgagacacggtctagctttgttgcccaggctggagtgcagtggtatgatcacggctcaccacagccctaaactcctaggctcaagtgatcctcccctctacagcctctgagtagctgggaccacaggcacgagacaccacacccagctaatttattaaattttttgtagagtttgggtctccctatgttgcccaggctggtctcaaattcctgggcccaagtgagcctcccgcctcagattcccaaagtgctggaattacagacataagccaccatgcccagccttgttcatgattaaaaaaaaaaaaaatctcagctagctaggagtagagagaacagcttaatataataaggaatagccaccaaaaacttacaaagaacaagctgtttaaggtaaaacacagttgtccctcagtatcctcaggggttgggtccaggacctccccgcagatagcaaaattccttgatgttcaagtccgtgatataaatagcataatgcttgcatttaacctatgaacagcctcctgcacactttaaatcatctctagattacttataatacaatgtaaatgctccttagttattgtactgttatatttttgtattgtttttattgttgtattgctatttttattgggattttaaaaagtatttttgaccagtttttggctgggtcctcagatgcagagtccagcgacacagagggctgagggtgtagaacatgttccctctgagatcacagatgagacgttcttgctatcaccacttgcatttcacattggactgaacgttctatccagtgcaaatcctagccaggcaagagaaaggtaataataggcaaaaggattgtgaagaaagaaagatgagcctcattttttatagatgtgattgtgtacctttgattgggagggtatatctgagaggcttgggatatgctggtgttggtgaaatataattaaaaacaaaatatcctccaaacccagagctcttctccacccaggtagaagagaaagaaaatagttttattaatgggtaagcattaaaccagaacatgatatgcgaagagactgcaaagacagaaaaaaaaaatttcacccttttatatagccaagcagatacaacttattacatacctgctctcaagataaacaacagctagtcctcaagttaaagaacttgacagctctatttgctgtacatggttcaccgtaaattcacttggttattgggatagccaactgtgtttgttaattggcttaatccaagggaaaaataaacttctagtatctttatcacaggaggtagatttgctacttggggtgaggtgcccaccaaagttaggctccatcccctcccaacaagaagctggggaagatgtttcgaggtccttgaaaacaccctcctgggtcataatgctggccgcaggcttacttagctttgaaaaagattagtgtaaacgttgaagagagagagacttgcaatggcaaaattttctaaagtaaatgctctaagcaaaggggacaaggagtaatcgcttcctgaattttcaacagggagaattcattttttttcgttttcgatttgcatttgcctgtacactggtaatgttttattttttgattggaaacctgtttagacagacaggtttacgtgtaaaaaaaaaatgagattttctgaatgtaatacttttaaaataaaaagacaagggaaaaatgttacacaggcgaaagaaacactcttgcacctcatgaggtttgacataagaaagcgacacggtcggatctggtgctagaaagatcctgctggcactcatgtgggagatggatgagaaagagaaaggatggcgtagtgggcagaggcagccatcaagagcagagcctgaagcctggggatgggggagaggtggtggttttgttaccagaaaggggtcccgatcaagacccccagagagggttcttgaatctcgtgcaagaaagaatttgaggcaagtccataaagtgaaagcaagtttattaagaaagtaaaggaataaaagactggctactccataggcagagcagcagcaaggactgctggactgagtctccttatagttatttcctgaatatatgataaacaaggggtggattatttatgagttttccagggaaggagtggagatttcctggagctgagggtgcctcccctttttaggccagtaggggaacttcctgaagttgccatgccatctgtgaactgtcatggtactggtgggcgtgtctcttagcctgctaatgcattataattagtatataatgagcagtgaggaccaccagaggtcacttgaatcgctatcttggtttcggtgggttttggcagcttctttaccgcaacctgttttatcagcagggtctttgcgacttgtatcttgtgccaacctcctattgtcatcctgtgactaagaatgccttaacctactgggaatgtagcccagtagggctcagcctcattttacccagcccctattcaagacggagtcactctggttcaaacccctctgacagtttggtgagaaatctgggcaagacagggtcagatttggtgatgtcttggatgtgaggtgggagagccaaaaggcattcctgactgtttgtctggagtatggtggtaaccaagaagggggaagctggcagtgatggtgggtgtggaccaaaatttcaattcaggaggcaggcagagatgtgagtttggagatcagaatggagagacagcagtgacaggaagctctaaggcaggaagggaaggccatcagcatcaatcatctccacggttctctccagttaaacccttctcaggcaccaccccatccaggaaaccactccccaagaggaagaacacgtggaacttcctgaaatgcgcctacatggtgatgacctacctcttcgtatcctacaacaaaggggactgggtaagaagaaggcagcacggaggggaggagtgtgaggagaggaaggaaagaggagggaagtgggggcacagaggaagcgaaggagggtgcctcagaggtgccaagcaggaagtggtgggagagcccttctgtaaaacactctcttcttcccactctcccacccgcctccatctctcatttcattcttccttcctctctccttcttccctcttttctccctccctccctccccttcctccttccctttcctcttccttttttcttccctcccttacttcctccttctctctcctccctccctattctttcctcctcccttcatccctccctttctcccttccttcctttcttcctctctccgtctgcttcctccctcccttcttccttcccatccttcttccctctctgcccttctttccttcctccctccctccctcttcttcctccccgttcctccctccctccccccttccttttcttcctcccccttttcttcctctccctcttcttcctctccctcttcctccctccctcctcctcccttccttttcttccccccctccctgttctttccttcctccttccctccttctctctccttccttctctttccttcttccctccctcccacctctagactgggataaaacttctcccttctgcactaacacagccccaggggctcctttgaaatactgtcactcattctgcctctctctctgccgctgtctcttgttctttctaagggacgttcataaggaccaagcctgttgctggttgctggggactctgatggttgagctaccttcaagaaggtcctaattctgtaagggaggcagacatccacagagagaaccagatcaccgagtggtagcacttcatgagcaggtgctagtgcaggaggcagtggcgcttatctcagcctaggggaagtgtgggctcatggaagcctttctgcaggaggtgacacctctgctgtgggttaaggacagaatggaattagccaattgaggaggggaagcaggggaagcattccagagaaacaccatgtgcgagactcagagaggtgaaaataaggcagggtgcaagaaactacaagccaggccgggcacggtggctcacgcttgtcatcgcagcactgtgggaggc[135 bp omitted]aggcaggagaatcacttgaacctgggaagcagaggttgcagtgagccaagatcacaccagcctgggtgacagagtgagactctgtctcaaaaaattaaagtaaatagaaaaaaaaagaaggaaaggaaggaaaggagggagggagggagggaggcaagacggaagggaaggagggatggaaggaaggacaagtcatccttcattcattgattcagtcagtcttcaaatattcacgtgtgtagaggacccatcctagatgctggggactcagagaagaacggaacccataaggtccttgagtccccagggctcccatgtttgggatagcaggaggactgcagagaaacaagcagccagctccaaaaaacatgaactaaatcagggtgatatcacagagtgagcagccatggccacgggcagccttccccgggcaggtaacgtctggacataagagatgagacagtggaaggatcttgccttcagagcagcttgggggcaaccactgcaagcaaagcaggcatgcacagcagaccctgaggcaggaacacactgagtaccttcgaggaaccaaaggaacatctatgtgacctgagaggggcaggggggtccaggtcatgtaaggttctcatagaccacgagaaggaagcttgtgttctaagctagtggacagccgccagcaagatcccttctgagttatcaaaggatccttctcaatgctgcctgtggagagtggatcggaatcagggcgagagtgggagcagacagactgagaggaggagacacactgagaggaggcccgaccagccagcgcaggggacctggcggtgctcatggagatgagagccgtgcagcagttctaaaggaactgcttatgcgctgggtgtgaggaataaggaaaatggagagaccagggagatgagcctgagacagtgacttcagttatgctagtggttctgaaacgggggtgacgttgccacccaggagacactcagcagtgtctggaccacaggattggttgtgacagctggaggagggagctcgactggcatccagtgggcagaggccagggaggccactcaacctgccatacggcccaggacaacacgccacgacaaaaataacccaggtcaaaacgtcaggaacctgaggctgagaaaccccagcttaggggattgtgctgcttatggggatgaggagaactggctggaagatggggaagaaggtgggagtggtgagaggcgggctgaatagagaagcaagaccagaagatgttacaaccagagggaaagagcagagggggaggacgggaaagaagcgagagggggatggggagaaagggaggtaaggaaggaattcactcgcctcaccccaactgtttctttctctgttcccagttcactttttcctcccaagtgttactgccactactgtaacttggaactggacatcaggtatgctatggcagggaagtgggcttttcccaccgctggggtggggttaggggaggttcatcccaactgcctggcatttgaggtaaggaacacaggtggatttggaagctgcaatcatagaaacccagaattccatgagaagtcccaagttcgtcacccttacttgcaagccactgcctgacaggggcaaggaaacacattgtaaatgacagggatgtgccgggcaggaggaactcctttataaattcactctataattttttcacaagtcttaggacttgtggcccaacacacacgacataaaattaaccattagtgacattcagtacactcaaaatattgtgtggccatcaccactaatctgtttccagaatcttctcatcatcctaaaagggaactctgtaccaagacatcgtctcttccccctgttcctggcaaccactagtctactctctgtctctgagaactcacctactctggtcatttcatacacatggaatcatacactacgtggccctttgcatctgggtttattcatttggcataatatttccaaggttcatcatggtataccttgtatcaggactgtattcgtttctgctggataacactccacggcatggacatagcacactttgtttatccatcatcaggtaaagtgcactgggttgctcccaccttttgactgttgtgagtcgtggtgctatgaacaagttatgttagaatatctgttttaaaatcttttggggtacaaactaggagtggaattgctaggtcatatgataattctgtgtttataacgacccactgatgcatcctggatgcagtagtgaacggggcagacaagattcctgagctcacaagaaaacaattagatgattacaggtgatacttagagctagaggaaaagctgaggatatgatgaaaaagagaactaaagaaccttgccctggatagttgggtgatgaaggaaagcctctttaggaaagtgacaatgaatcaaaggcctgtagaatgaggggttgtcagatacacagaaaacaagtgaaagagcctccaggtgaaggaactggcttgtacgaaggccctggggtggaaagtggcctagatgtgcctggagtcagaaagaaaaatgggggcaggagaagggggagggagtgggagggcactatgggaggagtgtgggtgacatgctcagcagaccacctcagacctggaagattagagcaagcattttagacccaaccttcagagccatgggaagccacggaaaggctgtcagtgagaaagagacacgtcccagtgacatgaagtgtagaggccagttaagaggctactcagtttccacgagatgacggtagcctggtcaaggctagggtccagggtacggagagaaagtacgaaagacagatgggaggtttctcttccctcgatagctgcaaagagggtccccctggcctctcccgcatcgccagagaaagtactaaggacagatgggagatttctcttcccttgatagctacaaagaggctcctccctggcctctcccacgtcgccagagaaagtactaaggacagatgggagacttctcttccctcggtatctgcaaagagggtcccccccggcctctcccctgttgccagagaaagtactaaggacagatgggagatttctcttcccttgatagctacaaagaggctcctccctggcttctcccacgtcgccagagaaagtactaaggacagatgggagatttctcttcccttgatagctacaaagaggctcctccctggcctctcccacgtcgccagagaaagtactaaggacagatgggagacttctcttccctcggtatctgcaaagagggtcccccccggcctctcccctgttgccagagaaagtactaaggacagatgggagatttctcttcccttgatagctacaaagaggctcctccctggcttctcccacgtcgccagagaaagtactaaggacagatgggagatttctcttcccttgatagctacaaagaggctcctccctggcctctcccacgtcgccagagaaagtactaaggacagatgggagacttctcttcccttgatagctacaaagaggctcctccctggcctctcccacgtcgccagagaaagtactaaggacagatgggagacttctcttccctcggtatctgcaaagagggtcccccccggcctctcccctgttgccagagaaagtactaaggacagatgggagatttctcttcccttgatagctacaaagaggctcctccctggcctctcccacgtcgccagagaaagtactaaggacagatgggagatttctcttcccttgatagctacaaagaggctcctccctggcctctcccacgtcgcctgcctttcatcctctccctggcatccccagtgccctttttacattaaaaaatgtcaactcgatcatacgatatacccccaccccctgctgcagtcctgcttaaatccaccagtggaaactcaccaactatgatgagtgtctttcaaactttaaaagaaagaaaatccaaaacacttttctactgaaatcttacatggaatcccaatatataaaaaattctaagttgcttttcattaccagaggtacttttcctaaggttaactgtgtgacatttacttattatgaagtgaggtgatgagatttgcaagcacagggtacagaaggcctctgctgtcttacgttactctcttttaccccgtatcttgcagtgtttccttttaattgttcatacggagaaaaatctgagcccacagagataagtcactgcaaatgcctaatagtttgccttgtgaagtgtacatgcccttcaggtaatacaattttttccccaaggtctgtatgtaaaacatgcaacaggttggtgtggctctccagtgaataaaaatttcagtccatgtgctatattttgggtacacacctattttaaaaaatagtttaatttttgaaatgaaaatcaaagcaaacctttgtggaattcctaaaagatcccaagttttcagggaacctggcaggaagcctctgccccattgatcaagttcaggtctctggcatggtacccaagggttctcaggctccaagctcctcctgcttctctaaacttttctccacttctcttgatccccccacccacattccatcccctgtccatattaaacctttttttttgagacagggtctcgctctgtcgccaggctggagcgcagtggcgcaatcttggctcactgcaacctccgcctcccgggttcaagcaattctcctgcctcagcctcccaagtagctgggactacaggcgagtgccaccacgcccagctaagttttgtacttttagtagagacggg[142 bp omitted]ggctggagaacagtggcccaatctcagctcactgcaacctctgcctcccaggttcaaacgattctcctgcctcagactcccaagtagctgggattacaggcatgcaccaccacacctggctaatttttgtatttttagtagagatgaagtttca[132 bp omitted]catcacattttttttcccgctccattatgccattgcacacattgattccttgatctctgtctacctagaaaagtcctcctcagtcctcaagattcacctaagcaatgctttggttcaggaaccaacagcaatccttcagattccactggggaggatgctgaaggaaatgaatggtgttgaacggtttctcaggctctcttcaaccatacattaaagcaccggtcaaaccagatagttattttcatataaaggtgtgctttcaacccattaggcaagaggttggcaaactttctctgtgaagggccaaatattacgtgttggcttttcaggtcatatggtctgttgcaactactctagtcaaagcaatcgtagagaatacactgatggctgtgactgtacccaacaactgatgaaaggataaacaaaacgtagtgcattcatacaatggattattattcagcccccaaaagaggaatggggtcctggcacgtgcaacaacacggctgaaccttgaaaacactgtgctgagtgaaagaagcagacacaaaagatcacacagtagatgatgccatgtatatgaaacagacagatctggcaaattcaaagagacagaaggccaattactagttgtcaggggctgaggggaggaaggaacaaggggagtgactgcttttaatggatttcttttttgggttgatgaaaatgttccactcttagaagtgacaattgcacaacatggcgaatgtaatgaaggccactaaattgtgccctttcaaaatggttaaaatggtgaattttatgttatgcattatgtttgcattttacctcaattacaaaaagaaactttattaaaagggatgcaggctgcagttggccctgcggaacacagtttgagggcccctgctcacatagactgtgagcccctgtgggagcaggaagtacccctgatccatccctggaactccagcacccagaagcaaaccttaaggttctcttcctgcaactctgagtgactccagcacaccaggctagggggtgcagcccagccaggcctgggcagtccctgctcctgcggggcgcgccctctagtgggaggtaggggtgcaacacaagctcaggcccggcgccgggacagtgaggaactggagggggcgctgcttcccactggctggtttctagaagagccctgctctgaggaggagacacttgccctggtgatggggcagagctagggtccataagatctgagggaagcgtgttccagctgctggaacagcccggtgggaatagggacaaacttggtggaacctagtgagtggggagaatgggctaagctggagggaggaggtgggcttgaggcaggtcacaaagagccctgtagaggtggatggagagggcaccaggcaaggagtatgagaatgcatgaagacgaaaatcaatgcacaaatacatttctctctcctttcttagggatgatccctgctgttctttctagtgagcctgctccatctcagcttagccttcacaaggcctccatctcccaggcattctaacctctgaagaaagctctctgtcccctggactgcctgtgtggagggtaatgaactgggtcctttaaggaatggcacctgggtgcccagaggcatggccagaaggtgtctgtgggggccatgccttagggggatgcacccagggcggctgagagagcaactgcaggagtttcccctaaaatctctcctccagatcgttctcgaactttccccactacttccataataaaatgtatacttgttgaaatggctgaaaaggctgggttattccattcgcccaacactgaaaactaacaggtatgctggtggattaccaagaatcaaacgctatcagttaactgtgcactttacaggtgaagacactacagctcagagagaccgatggctcgtccaacatcacactaagctacacagctgagatttgacccagttggactcattccaaagtccgtattcttttgtgtaaagatttggggctgcccccaccgtcctgaggaaatacagttgtgaggatatggctgttccaggaggaagccgtatccagctctccagcctgcatgtttcttgcctattctggaggaggttccttgtcctggttgaaagctttggctctggagacaggtttcttgggttcgaatcccagctccaccccttaatagatatgcaggcttggggaaggtattgtctcttaatgccttattttatcatctgtaaaatggggatagtaacagtagggtagaagttctcttatcatcatgatcagaaccatcactggttggttcatcaaataagttggttccaataggtaattaaaaatacttttaccattttgttttaaaacataaaattgtacaggcatttgctaatcttttgatataagaccagggggtttcgttgttgttgttgtataggtctatggacctacaatttccagtttgtcccttaaaagggcagcggagacacaggcatgcttgcaaagctatttaagcaaaatcctcactgcattaaaaaaaagaaaaagatcatccctatagccatcttgctcattccaacttgacatattttttgttgttgctcttattaacaatcggcctttatcacatctttcccactgaattactgttttgggtggaaacaattctttgctgatgcactcatattttcctcatttatgttaaatgtaattgcattacataattgaaataaaatccattagaatgaaaaggtttagaataaatgcaactcaactagctctgggtagtcacacaactgaaccaatagagaagaatgaaggcatattagaaagcactgcactagccaggggcattcagtgagcctgaagcatcagttggtatatttcatagacggatggaaaattcttttaccccagggatcattttaaagtggagtttaagaaacagtctactgagtttgcctcatagaggtaaagtttaaatgagataatatatatatatttttaagttccacgatacatgtgcaggctgtgcagttttgttacacaggtaaatgtgtgccatggtagtttgctgcccctatcaatccatcacctaggtattcagcccagcaggcattagctatttttccaatgctctccctccccacaatcccataccccgacaggccccagtgcgtgttgttcacccctatgtgttcacgtgttctaaataagataatatttctaaaacacactgcctggcacatagttctcaattaatgtattgttattatctagggcagtgttatccaataaaaatctgtgagccacacttatttcacacttcctactagcccagaagcccggtaaaatcaatttgaataatatgtacgatttaattcaatatatccaagatacatttcaacatgtagtcaataaaaaaaattattaatgagatcagttatatccttcattttgtatgaagtctttgaaatccattgtgtatttttcacttatggcacatctcaatttgaatgctaaaattgatctgcaattatattttctaacatttatagttaaagagtagatccacatatccaagttgttccaaacagggttaaaggttgtctgataactgaaccaagtatcaatttaaaatttttcattaaaattaaaaaaactttacaagtcagttcctgcccataatccaagtctagtcataagcaagcatcatacaattccaaatggagggacattttacagaacacctagtccgtacacctcaaaactgtcaaaatcattaaaaacaaggagagtcagacacactgctgcagatcagaggagggcaggaagacatggcaactaaatgtcatgtggtgtcccacatgtgaccccagcacaggaaaaggacgttagagaaaaaactggggaaatgtgaataaagtctggcgttaacagtactgtagcaatgttacggttctgacatatctactaggcttatataagatgttaacagtagtggcagtggggaaggggtacatgagaatgctctgtactgtatcattgcaacttttctgtaaatataaaattatcccaaaattaaaaatgtaaaataaaaaatattccactcttcagctgcacttatcttacgtgtttgtgtccccatgtcctcctctgttaaatggggatgtagactgcacctatttcatacagtcatcgtgggaattaaagatggtgtttccacagaaatcctgcaaccatagttcaggcattgtcagcacaccatgcttgttagcgccagttactgttactgctgctgctatgattatgattgtttatttgtaagtgcagaggtctgggctcccatctccagacattctgactgagttgatatggctgtgtttgcataacagctcataggaagctcttgtcttttcttacagcaactcatgtgcaaacagggctgatcctttaaaatgtaataaagaaactgctaaaagccacggaaaccacccagtaagttgatgacagacagatggaagatgtattagtctgttttcacgctgctgataaagacatatccaagactgggcaatttacaaaagaaaggtttaatggacttacagtttcacgtggctggggaggcctcacaatcatggcagaaggtcaaaggcacgtctcacatggcagcagacaagagaagagagcttgagcagggaacctcccctttataaaaaaccatcagatctcgtgagacttattcactatcacaagaacagcatgggaaagacctgcccccatgattcaattacctcccacggggtccctcccacatgtgggaattcaagatgagatttgggtggggacacagccaaaccatatcagaagagaatgccaatccctccgtaggtaagttaggcaaaaatgatgtattttattttggtggaacccagtagtaactaatttttaaactagctttataaattcttttatcattaggaggtttcatacgctaaccagatgattatatgtccaggtgcttgatgttagttttttgtaacttctcctggataccattaatggcctttgtacatttaattatcccttccctttgatgatgggagtgctcttaaatttgatgtaaaatgaagttaatgtgtcagatcatgtccagacattcatatcagatttcaatcatctggtgagagtttactgggtgaccaagttatgggaaggtatagaagagtgttcaggaaaacttttagggcagcagttctcagtaggctgacttcagcccccaggggacatttggcaatgtctggagacatttttggttgtcacgaccaggagctaggggctggagagaatttttcctggcatccagtgggtgaggtgagggaagatcctcaatatcctaccacgcacagggcagccccccacaacaaagcaatgtctgtccccagtgtcaataaccctggtattgagaaactcggtaaggtctgaggccattcagctgttgagctcactgctgtctccttggccactagcacttattcggctctcagtgaatgaatgaatgcacagcacgaacctgtaatcaaggaccaagcgaactgcgggaggcagggttgctcctgagagcaaacagtgacctagttaacctggcgacaggcgtgaaaggaagtctgggtttccaatcaaaaatcgggagggaaggaaaaaagagtgaatcaattcttgcgaaaagtctctgcgcacttactagaaagcacgcggccaggaatcatgcagggcgcctgcacgcatattattatttaaataaagctgtccctcagcacaaacagcccgcaaggtcacggaaactcctccagtcccatccccgggctcggtcctcccacgaatctccccctcctcccacgtccccgccccaggcgcatgcgccctccctctccccaacccaccccagtccggcctccgccagtgacgtcaccgcaagggcggaagggaagctaaagtcgttaccatggtgaccgcgacacactcagaaacgtctactagtgacggtcaagccacctacaaccggtcccaaagccgcaaacgagtcaggcatcgtggtaggacctggcgagtggggccggggagagcgggacgcctggatcgggaacttgtcgcattcacattggctgctaggaggcctcggcgaccacttccggatccggggcgggggtcgcaactcccagcccttgctcagagggctgaactagaattcccagaagcctctgcggccgccttcctgctccttcactcctgcttcccccacaaataacagtgagtgaaagcatctaacaagcgtttccaactcgccgaatcattactagtgcaggcattttattctaagctgctttttactaaaacgtgctcttgtcgctctgaacctttaggactacaatacccagaagtctctgggagtcgccgagccctgtagtttagggttgttttgcggccagcgagacgccggaagtctgggaataaggcgggaccagggaaaaagcaggattccgattggtgaagaggccacatggccttctttaaaggacgggatagagttgcacacgcgcattgaggcgtgtcttccctggttctgcgtccgtgaagcctagagattcccgagcctgggtcacccgggcggtgtcgcatgtcgtctgcggggaggttggggctgctcgcgcgaggcgctctgggtctcatttccgaggccgaaaatgctggctccaaagtggtgccctgggagatgagggcgactcgcagattccaccctattctctgaatgggcttcgagtctccatggtaacggcccctcccagttcccctgtgacttcatagctgcccacgggaggggagaaagctgatgtgaaggggctgtgggttctcagccaagctctgtctttgaggccacctaccctataccactcgtcccggaaagggtgagccggtgacctttcaccctctctgggcctcagtttccctttttgtgaaataatgtctggtacccctgctgtgctcccttactatttcagggccccgggcaagagacacactctgtgtctcagtttccgcataggtaaagtgaggatgatgttagaatttgatgttaaaatttaggtggtggttgtgagaattaagggaacctcagagcaatggccagcacacaatgacccttcaaatgtcagcggctttgatgatcaccattcttaccttttctttggagatttggacaagttaccgccccaccttcctccagggtctttgtgtattgatctgcaggttggatgtattggatgttacgaccactaaactttcttctgagcacacacgagcagtggtgttgttctctctgagaaatactacaggctttggtgttaagacactggaattccggaaacctgtccctgtcataccagttgctgtgtgacctccgtcaatcatggttctttactgagccctgagactccgcacgtgaaaatggatggggatgaacttccagtccaggcagtgccactgactttgcttggggacctggggcaagctctgtggcccagcattgcaccatctgtaacaacataaccaaggggtgcgcaattgagctttgaggttaatttcggtgctaaaatcccggtcagtagttccgtcatcttcacagacctcaccctacccaatgcccttattgtgctccacatcccaatcaacacttactgattccagatttgtaatttttgccattgtagtgagaagtaattaactattttatggttttttaaatttgaatttttgactatcaggattagcatattttttttttcttcgttaaagactagtcaagtgcattagtgaggaggggggaaagagtagaccaaggaatttggtctgtaactgactgtggacaatacattggtagaactcactacctttgagccagccagaatctttttattattcactggatattcaggttttgcctctgtaaattttctttcattgccatttttttcaaatagttcattcaatctttgttttcagatgtgctttccacaatcaggttacaaattctctgccactaatgatcattacaattcctcttctcagcctgtttattgtttggtctgtttatggtttctcaggcttcttatttatttatttagacagagtcatgctctgttttccaggctagagtgcagtggtgtgatcttggctcactgtagccttgacctcctgggcttaagcaatcctcccacctccgccacctgagtagctgggactacaggcgcatgccaccacctgcagctaatttctgtatattttgtagagatggggttttgccacattgcccaggctggtctcgaactcctgggctcaagcgatccagccgccttggcctccagagtgctgggattacaggtgtgagccaccatgcctggactaggcttctttaaacattgaatagtgttcctttctagatgaaggaggatcacatagcacttgggagcaaagatgcagccaagtaacccagtgctggagcccacgatggagaagatctcacggccactctggccttgccctgggtgctttagtaactcgggaggaaggccacccagacactgcaggacaccagcatgctgaaggtcaggaacttggcttcgttgaaagcatcaggcaggttccttgccagaaaggctacagcaagggaccctaaaaccaagaagcccaagtagcccaagacagagtagaaggcagtgacggagccctcattacactggataatgatgtagccaggcatgaactgagggtccttgtttacgaagggaggctctgtccccagccagattccacagagggtcacttgggtaaaggagcaaaggaagacaacagaatttgttttttggggacccatccactttcggatcctgctttctggccttatagcctggaaggccctgcagaaaacacagccactgtgaacacagctgcaaaggtggtctgtgagaggaggcaggtggcagggctggggcggccgatgaagagcgaggaagagagaaagcagagtgtgagggagacaaggagggtgtagctcagagtctggttgctggccttgactatgggagtgttttggtgccacacaaactccacaaggatcagaacagagaggacagagtagaacaaggctgtgcatgccagagtcaggcccaaagtttcatcataggccaggaaggtctcctatttgagaaggtatgttcccttttcttgtttggataatgatattcaggacaaagcctgcattgttttatatctgaaataaacaaaaagggtgtcactgtctccaaaacagagcactgcacgtttggtaagattccattgcccagagctctcaccaccacagcgccatttaggtggactgtttggctggtgtgtgtgtgtgtgtgagagttgtgtgtgtgagttgtgtgtgtgcgtgcacgcaagcatgcgtatatgtgttctgcatgtgttttaaaggaaaacataaatacttcaccagcttttttttttgaccattttaatcagttttattgattcatgcttccggttcttattcagttcaaaacaaggcacattaaatacatcctcttattgctttataaatgcacgtagctcattctctatatcaaaagtaataaataatggccataaaacaccaagacctttataaaaatgacaacccagccttgaacatagtatttaacagtccaatctagaacaataacccaacacggtacatcaaagtgccacatatgaaaacatgcagtgtgtgtagtcactctagtactgagcttgcactggctattctttaaaaacatactagggctttttcactccttaaaaaaggtggacatgatgcaaacattgcaagttatagcatcactgactttaatattacatttatgtgccaaaaatctttacagatacataagagaaaataaaatcaatgataacaccgtatatttaataaaagtgaaaatgagttttttgttgtgccaaagaggaagctacatattttgaaacagacaaagccaagccagaaactgaagcagaagagggatcacgcatttaatagcagaaatcctaatacactcagtataaattgattgaaagcaggaatattgcaaacagcatgatggatatgaggcagaccaccgtggctaaacaaataatccagcattatcattattgttatgactgtggtggggctatttaaaggagtatccaactctctagcacagatgggggttccttcacctgactccccttaaaggctcttgaaataaatcacttgataataaaaggcaatccctgcatacccaccccaaccccaacagaatcaactaatgtcaagtttatatgcaaatggaaaattttttcttttgttcttggaacgaatttcaaagaagctcattcccccctatttcttgtctccctttcttaaatcaggtaaggaagctgtacaggcttaattcagaacttatggctgggtgcagtggctcacgactgtaatcccagcactttgggaggctgaggtgggtggatcacgaggtcaggagtttgagaccagcctgaccaacatggtgaaaccccatctctactaaaaatacaaaaattagccagatgtggtggcgggtgcctgtaatcctcactacccggggggctgaagcaaaagaattgcttgaacctgggaggcagaggttgcagtgagccgagattgcaccaccgcactccagcctgggcgacagaccaaggctccatctcgggaaaaaaaaaaaaaaaaaaaaagaatttacacaaaatgctggggtgctttattcacagtaatggcttgaaatcagttcatttccaaacgagtctctgggattggtgaaggaccgtgtgttttagcatttagcagattttaagtaaaagcagatatgctcaaaagaagaaaagtgtgcttttctttgtccttaaaggaacttcattcatagcaaaatatgcacaaacaagacctgtttaacaaacacagatctgctcgggccagtcgcatcctaagcccggtccctcctgtaactatggtccactggaattgggactcttctgtcgaggttctcttctgcagttttcattagtataaagagccggcttccagacacccttcctttttgaatagcactcatcagctgcaaaaattcattgagttcaacctgtccatttttattcaaatcgacttcatttagaatttcatggagtgtattttcatccatttggacattgatactctctaatacacatggaacatcaacaatggtaataaagcctttctggtctgcatcagacttacaaaatctcttcttatacctgtcactgtctgaaggcagtaggctaatttcagagccatctgttaactgttctgatcaaagtttagtctgtttcataatatagaaacttcctggttgtttcaagttgttcctgtttcttataatcatctcaattctgttctctgcccattagttcaacaatcctgagtagggcttgctctgctgcccggacatttagaaaggccaggcgaggctgaggcaggcagatcacctgaggtcaggagtttgagaccagcctgaccaacatggagaaacccaatctctactaaaaatacaaaattagccaggcgtggtgatgtcctgaccaacatggagaaacctaatctctactaaaaatacaaaattagccagggtggagacccaatctctactaaaaatacaaaattagcctgtaactccaggtactcgggaggatgaggcaggagaatcgcttgaacccaggaggcggtgattgcagtgagccgagatcataccattgcactccagcctgggtgacaagagcgaaattctgtctcaaaaataataataataataataataagccaggcgagtacaacgtgaaatcatatccacggtggtgcaggaatactccttaatcccatagttcacctctgcttcaatatatggaaattctgacacaagacgtactccaacaataggccaccttttgctagtcacacttgccattgtggccacctcaaaagccttatcaccataggtggcagcaagatgctgtgccccctcgctttcaagtccataatcctggacaagcttcatgtagagtgtggggttccaatctttacccccttgaaggaaaagcccagctgttctacttggtcctgctttcaaattgtgggttttgatagcagcatttagggtatcttcgccacagaccggtaagttgtccactttccacctgctgtagtaataagacttctctcactgacatggacaacatgatttcaggagatagactgagtatctgcagatttgggatctgtaacaaggggacggatactgctccacgctgctaggatgtcgcccctcttctcacctcaacatcacagctcaggtaattacgtgcttcattcaaaatgaagttaatatcttcttctgaaggacttggatggtgtgtaatatcagttggggtatcagtagtgccagcaatcatcatcttttgccagggtaagaagaaaataactcgcccatcactggtcaagaagtcccatgccctctgggctgtaataaccaggcatcacaatgtggacaccagcagttggctggcagatagctgcagcatccttatcatctattttgcacacagagtctgtgaaatgtccaacggcattgataacacacttggctttcatgtcaaattcctgccctgtgaggacatccttgcaccatgcaccactcacacgcactttcgctgtctgtctgggtgtctgtcttcttaagcaagctcactacctccctgtcattgactgtggcatccccatatctggcagcagtcagcacaatggcaaggttcatccatgcatcgttatgtcgtccatcatagtagacaattcctcctaccagtttgtccttctggagcattgggaaatgttcaagggctcttgatttgctgaggacataactgcttttcaggcaattacttcctgcaaccaaatcatacagcttgattcctacccagtagtaaggtaactgccaccacttgtaaactggaagcatgataggcaatggagctgataaatggggagaaatttctggcaggttggcacgctcatcaagggcttctgttaccatccggtactgctcaatatccaacttcatcatggccttctgaagatatctcacaccaccatggatcaaattagtgcttctgctgctggtccctggtaagtaatcatctctttctacaaggctgtttttagtcctctggtgacggcatctagtgcacagccacttcctctttcttctcctcccataacaaggatatcaaattcagatatatttttgcaaagtcagtagctgagcgtctctggaaggaggctccctgttaacaggttctgaaatgcagtctgctgcttcaacatagaccaggctcatttgtttccttctgtaataagcaaactgagaaagtcctaaaacagttgcaagagcacctccttcaacaagaattgtccctttcactgccttttgaaaggccatttcttagcctgaggacttctcattgtctgccgccagatctggcttcccctattccacacctctcagccggcaggcttccctaggcctacaaatttgtccaggaggcgggcgaccccgcaaccccaccatcagagctcagagccctcgcctggctttacacttcaccagcttttccagtaatactgggggcaaaatatcctggaaaaacttccactacagtgtctttaataattgtggatcttacctctctgttcatctctgtctctatctcatgtaaacgcgttccctccctgcccaatctatctctcgccatcttgatatctatctatagatacagacatgtagtcgcctctcagtatgtctgtaggggattagttctaggatcatctcaggcaccaaaatctcaggctgctcaagtccactgcataaaatgaagtactatttgcatataacctagcacttactcctgtatactttaaatcatctctagattacatataatacctaatacaatgtaaatgctatgtaaat[170 bp omitted]gcctcccaagtagctgggattacaggtgcccgccaccacgcccggctaattttttatattttcagtagagacggggtt[145 bp omitted]tgtcactcagagtgcgctggcacaatcacagctcactgcagcctcaacctcccaggctcaagtgatcctcccacctcagcctcctgagtagctgggactaggtgcatagtttattttttgtagagacaaggtctcaccatgttgcccaggctgatctcaaactcctggactcaagtgatccttctgccttggcctgccaaagtgctgggattacaggtgtgagctactgtgcctggcaaaaaaatatgtttgatcccaggtttgttgaatttatggatgcagaaccctgaggcagaacttttttttttttttttttttgagacagcgtttcactcttattgcccaggctggagtacaatggtatgatctcggctcactgcaacctccgcctcccgggttcaagcgattctcctgcctcagcctcccaagtagctgggagtacaggcatgcgccaccacagcctgctaattttgtatttttagtagagatggggtttctccatgttggtcaggctggtctcaaactcctgacctcaggtgatccacccgcctcagcctcccaaagtgctgggattacagtcatgagccaccatgcctggccggcagaacttttttttttatagatacataatagttatatatattgtgggatcagtggtattttgatgcatgcatacaatgtctaatgataaaccaggacaattgggactccatcaccccaaacctgcaccctttctttatgttggaaacatttcaattcctcccctccagcaactttaaatcatacaacaaattattgttaactatagttgccctgctgtactactgaacagtagatcttattcattctatccaactgtatttttgtgcccacaaaacaacctctctcctttccccctctattcatagcctccggtaaccaccaatcaactctctaattccatgagatccatgtttttagctcccacatatgagtgagaagatggaatatttgtccatctattcctggcttatttcacttaacataatgtcctccaattctatccatgttgcagcaaataacattttattcttttttatggctgaataatattccattgtgtatatgtatcatattttgttcttcagttggtcaagaggtatatgaaactctgttcaacatcagcacatcagggaaatgcaaatcaaaaccacaatgagaaattatctcactccagttaaaatggcttttatcagaaagccaaaaaataatggatgctggtgaggatgcagagtaaggggaaccctcgtacaatgttggtgggaaagtaaattagtacagccactatggaaaactgtggtggttcatcaaacaactaaaaatagaatccccatgtgactggcattcccactgctgtgtacatgttcaaaaaaaaaaaaaaaaaaggaagttagtaggtcaaaaagatatctgccctcccacatttactgacacaaatttctgagggcctgtggaggaaaagttaaatattaagtttgaattcaattgaacatggccacaaacaatggtcaccaagtcctggaacaggttgtgtgagccccttgaggcattcacccagcactgttttggagaactgtctatttcaatctattcctatacattagttattgaaaaacaatagacaaccacaaaaaaaagttgacctttttgtgttccttgagcccagtcgtgaagggcccttgtgactgggcctcatgtcaaacaactccttacaaaaagaactagggtcccagactgcgttgaagcttcatgagacctctcattttctgtgcatggacgagtgtctgactctggagcctaggctgttgcttcccagcctggtggtgaatcctccatagtctggtgagtgtaaatagatgtatatcttttcccttcttccctccccattgcaatttgcttattatatccatttgcttattatataatttgcttattctatctacattgccatttacgtgggataaaggttgtttacccttaaaggtattgtgtgtgtgtcttttcttctcccctcacacgtttcccacacagaatggggcccctccccagaaactgtcttccttcctaatgtcccgctttatgggagctcagttcaagatgagatttgggtggggacacagccaaaccatatcaatgactgctttgtttggcccagattccagttgtatctactgggagaggaattatcccctgaaagagaacagggaggtcatggggcttagcttgctaggttcccttcttgtgtgaatttcactcttgcatgaccttttatccctgcctgaaaactgttgccagatagaatgcatccaggtttgttgttttctgtatcaggaagtccagtctagcaccagtcactctgtcatcaccagaagtagacacttaaaaaaaaaaatagcgtttgaaggggttaaggagggagaattcattagattagtgaggcagatatactggttatctgttgttgttgttgttgttgctgttttcaggatttcagggcctagattttatgacaagaaatatttcaagaggattagagtgtggtgttaaagaattaagaagacaatatatattgagtgccttttgccagctttgagttttgattaacaaaaaattacatatatttagagtgtacaatgggatgtcttgatgtatgtatatattgtggtttttttttttgagatggagtcttgctctgttgcccaggctggagtgcagtggtgtgatctccgctcactgcaagctccacctcccgggttcacgccattctcctgcctcagc[176 bp omitted]gcctggcctgatatacgtatatattgtaaaatgtctaaaacaagctaataaatatatccacatctcacagttaccattgtgtgtgtgtgtgtgtgtgtgtgtgtgtgtggtgagaacatttgagataactcttgaaaaatttcaagtacacattaggattctctatgttcaccatgctatacattaggtctctaacagtatttcatcttatagctgaaagtttctgcccttagacaagcatctccccaatcccccaaccctccacccctggtaactgccattctactctctgttactactctctgagtttgactttttaatattccacatataaatgggaatcacgcagtatgtggctctctgtgcgtggcttatttcacttcccatagtgtaccgctgggtgcctttcagtactgggcgattaactgcaaatgacacccccacccacacatgctctcacgtaaatgtgcggcatctctccctccacttcactaatggtacaaatcccactagatctcgagtctcctctgctttgatttccatcatgggccctaatatgcaacatattgatgcgctgctcataatcaatcatgccaagtcttcttcatgcctgtggcttcctcttcaacacataaagaaaccagccttgagcagaacatagcagctgaaagacactccttacactttgctctgtacccatcattcactcatccagcaaacattcactcagtgctatatgctgacccacctacaatgcccttcacgagttgaggttgtgcttaacctcaaaatagtcatgtgacacttacatgaatatagaaaagctacagtgattttttttttttgttagagatagagtctaatttcaggtgtccattaggatttactacattcgtcatgctatatatacattaggtctctaatgtcacccaggctggagtgtagtgacacgatcatggctcactccagcctcaaactcctgggctcaagcaatactcctgcctcagcctcccaagtagctaggactaaaggtgcatcccaccgcacctggctatgttttttattctttatagaaatggggtcttgctatatttctcaggctggtctcgaactcctggcctcaagcaattctcccatctcacctcccaaagtgggggattacaagtgtgagccatagcacctggccaactgcaatgattttaattataaatatatatatttattaataatacatttactatgtttatatattatgttttataatgtacatgttaaatatgtataccatataagtcatacacatattgaatataaatatgcacattatattaaatgacattaaatatatacaaatatcttatatgtatgatatataattttacatcccaaaatgcatattttacaatataagtgcatgcatatcttatactatctaggtataaatgtattttatgtattctatacaaatactatacaatacataaatttatgtatatattcaattttacacatctactaatatatgtaatctattttgtttttacatgtgtatttacatacacatgcgatacatatgcactgtagttcatgtattacatatgcatagttgtgtgttatatgtagtattacataagtatccatacgtgtatatatttcccatgtaaatgaatatgtgtagtatagataattcatatatatcaaaatatgatagtatacatgatatattcacattagtacatattttgatacatatacattataaaccttacatacatttatattatgaagtatatccacatagttagaagtagcttaataataaactcaacatttatggtagtggtcatgtatgggagtagcacagtgaagggagaaagagagaagcatggatggacaggagaagtgatcagtgtttactccttaggtggatggggatgtttttggtagttcatcattttactatgttttataactgacatgtatgttgcaagttgttttttcaacatattgaatacttccaaagatacaattataaagaaaaatgctgtcacagaatgcaaacttcctgttttaaaaattttactattttattataaaataattttagttttatgacattaaaaaaacatatttgtggccaggcgcagtggctcatgcctgtgatcccagcactttgggaggcctaggcaggtggatcacgaagtcaggagtttgagaccagcctgaccaacatggtgaaaccccatctctactaaatacaaaaattagctgggcatggtggtgcgcacctgtaatcccagctacttaggaggcttaggcaggagaatcacttgaaccgaggattgcagtgagctgaaatcacaccattgcactccagcctgggctacagagcatgactctgactcaaaaaaaaaaaattgttccaaaaaatgggtaaaatatggtaaagaagataatcaca[133 bp omitted]actaaaaatacaaaaaaaaaaaattagctgggcatggtggcgggcatctgtagtcccagctgctggggaggctgagg[139 bp omitted]acagaaattttaaaaataatttgaccttggctgggcatggtggctcatacctgtaatcccagcatttagggaggccaaggtggatggatcagttgaggccagaagtatgagaccaacctggctaacatggcgaaaccccgcctctactaaaaatacaaaaattagctgggcgtggtgccatatgcctgtaaacacagctacttaagaggctgaggcacgagaatcagttgaatctgggaggcagaagttgcagtgagccgagatcgtgtcactgtactccagcctgggtgacagagccaggctctgtctcagaaaacaaaaacaaaaacaaacaaacaaacaaaagttgaactaaataaaaatgaagttacaacttaccagatttgtaggatgaagcaaaagaaatgctaagagggaaataggagagttatagtattaagtatatcagtaaagaagataattctatattcaatagtctatgtttataccttaggaaactagaaaaagtactgtattctgtactctaatcccaaagcaagcagaagaaataataataataattggagtagaaattattgaaattgaaaatagaaaaatagagaaagtcaacatctaaatattccttgaaatagtcaatacaatttaaaaaacataaaaaaaaagtttttcatgataatttactttctcacatcttggtaggtcaaatatcttattttgttctttgtgtatcaccattgtaatctgggtagtttatttatcccaacaatgaatgtttttatttttaaaaaatttttatttcaaaactaatttccactttaggttcatggaatacatgagtaggtgtgttacttaggtatgttgcatgatgctgaggtttgatgattgatcctgtcactcagatagaaagcacagtacccaatagtttttcagcccttgcctcttgtcttgcttctcccctctggtactccccagtgtctactgttcccatctttatgtccatgtgtgctcagtgtttaacttccacttataagtgagaacatgcagtgtttggttttctgttcctgtgttaattcacttaggataatggtttctacctgcatcgatgtcactgcaaagcacaagattttgttccgttttatgactgcatagtattccatggtgtatatgtaccacattttctttatccaatccactaataatgggcagctatgttgatttcacatctttgcttttgtgaatagcgctgcaatgaacatatgggtgcatgtgtctttttggtacaaaaatttattttcttttggatataaaaccagtaatgaattgctgggtcaaaggatagttctgttttaagttctttgaaaaatctccaaactgcttttcatagtggctgaactaatttacattcccaccacagtgtataagcattcccttttctcagtagccttgccagcatctcttgttttttttactttttaataatagtcattttgactggtgtaagatggcatctcattattgtggttttgactttcatttctctgacgactagtaaagttaagcatttattcatgtttgttggctgcttgttttcttttgacaagtgtctgtttacatcttttgcctacttttaagggggttactttatttttgcttgtttagttgtttactttttatgttgattctgaatattagaccttttttgatgcagtttttgaatattttctcccattctataggtggtctgttactctgttattagtttcgtttgctgtgtaattagatccaatttgtcatttttttgttgcaatagcttttgagaacttagtaataaatttttttccaaagccaatcttcagaatggtgtttcctaggttttcttctagacatctcttagattgaggtcttacatttaaatctttaattcttcttgagttaatttttgtatatggtgaaatgtaggggtccagttgcattcttctgcatatgcctagccagcaatctcagcaccatttattaaataggtagttcttcaccattgtttttctgttgttgccattgtctaaggtcagatggctgtaggtgtgtggcttaattctgggttctgttttttgttccattgatctatgtctgtttttgcatgctgttttgcttatcgtagtcttgtggtacagtttgaagtcaagtaatgtgatgcttccagctttgtttttgttgttgtttagaattgctttgacaattcaggctattctttggttttagatgaactttagagtagtttttttctagttctgtgaaaaaagatgttagtagcttgataggattggcgttgaatatgtaattgctttgagcagtatggccattttaacaatattgattcttacaattaatgaacatggaatgcttttccattaatttttgtcatctattatttttttcagcagtgttctgtagttcccctggtagagatgtttcaccttcttggttatatatagtctaggctttttttttttctttcagctattgtaaatggaattgcattctttttttttttttttttttttttttttgagacggagtctcgctctgtcacccaggctggagtgtaatggtgtgatctcggctcactgcaacctctgcctcctgggttcaagcaattctcccgcttcagcttcctgagtagctgacattacaggcacccgccatcatgcccggctaatttttgtattttggtagagat[139 bp omitted]cccttaatttcattgtttacctaaaagtcattcaggagcaagttatttaatttccatgttattgtgtggttttgagagatcttggtattgatttctatttttattgcactgtggtccaagggtatggctgccatgatttttattttttttaattgattgaaacttgctttaggctgagcttgttgtccatgtgttccatgtgcagatgagaagaatgtgcactctgtagttgtggcttcagtgttctgtaaatgtctattagggccaattggtcaagtgtcagatttaagtccaggtttctttgttagttttctgctctgatgatccgtctaatgctgtcagtggggtgttgaagtcccctactattattgtgtggatgagtcttttcatagatctagaactacggctttatgaagctgggtactctaatgtggggtacgtatgtatttagatagttaagtcttcttattaaattgaggtctttatcattatgaaatgtttttcttcatacttttttatttttgttgttttaaagtctgttttgtctgatctaagaatatctacccctgctcttttttgttttccatttgtatgattttcttccaaccttttactttgagccgtatgggtgttgtcacatgtgagatggatctcttgataacagcagacaaatgagtctttctttttaaaatcaaacttgccactctacgccttttgagtaaggcatttaggccatttatattctaggttaatagtgatatgtgaggttttcatcctttcatgaagttgttgcctagttgctttgtaggtttttattgggtggttgctttataggatctgaggaccatatacttaagtgtatttttatggtagcaggtattgttcctttgtttccatgtctagaattcccttaaggatttcttgtaaggctggtctagtggtaacaaatacccttattgcttgcttgtctgtaaaatattttatttcttctttgcttttgaagcctagtttggtgtgacataaaattctttgttggaatttcttttctttcagaatgctgaaaataggccttcaatcccttccagcttgcaaggtttctgctgagaagtctgctgttggtctgatggagttccctttgtgcataatctaacatttttctgtagctgtctttaagattttttttttttagtattgatggtagacagtgtggtgactatgtcttggtgatgtctgtttcgtatagtatctcccaggtgttctctggatttcttctatctggatgtctacctctccagcaagattagggagattttcttaaattattctctcaaatatgttttccaggtcatttaccttttctccttctctcagaaatgtcattaattcataagtttggtcactttatataatcccatctttctcaaagactttattttttttttaattcttttttttgtttgagtttcttcaaaagaccagacttcaattccgaaattcgttcttctgcttgctccagtctattgataaagcttttaattgtattttgaaattccttaattgagcttttcaataccagaagctctgactgatttctttttgacatgtttatctcttccttcatttactagattgctgtagaaatatttgtgttgattttgaaccttgccttgggtgttgctgagcttccttgcaatgcatgctttgaattttttgagagcttctcttagtaaacaataataaagtatatacctagtgacattggccacagccatctcttattcatgcatgccatctgctggtagtatgccaaactgcacaatagctcaatataaagccagacatgagaagagtccatagggctataaaagcaaagccaaaagatggtagcaaacatactgtatgctcacaccttctagggagacaggggaaaggaaaaagaaaaatatatatatatatataagaatcttgtctgcatgaaaataattacaaaaattaggaatgccaacatctccagatgagaagaagccattgtaagaattctggcatcatgaaaaatctgaatgttgtgacaccactgaaagattacactagctcttcagcaatgatccctaaccaaaatggaaaataagagattacagatttaaaaattcaaagcatgcattccaagatggacaagtctggaatgggcaggcccatgtacaggcttcctgatagcagacacaagcaccagtgtcaaccatgtacccagaggtgtgactagccatggagatcagataggaaacctccttggctccaagttctctgcatagagtggggtgttctagatgcctggaggtctgcctgggcttggactatagaccaccccactgcaccacaatctctgcaaagaaagggtggggtggctcacagactgcctattttatcacatctctaccatttggtgatgatctgatcttgcacaaattattttattattatttttaaattttttattttgttcacttttccaacatgatgtatcagttacattgacataaccatttatttttattttttatttctgtgggtacatagtaggtgtatatgtttatgggttacatgaaatattttgatataagcatgcaatgcataataatcacatcaggataaatggggtatccatcaccccaagaatttattttttgtgttacaaacacaaatatagagctcccagaggaatgggcagaattccatctttgctatttctcagccttcactggtgatacctccaggtactggaaaatctgagatgactagggactggagaggactcctagcaaaccacagcagccctatagaaaagtggccaaattattaaaagaaaaaaatactcatccaaaggtcagcaacttcaaatattaaaggtaggtaagcccacaaagatgagaaaaaaatcagcacaagaatggtgaaaacacaaaaagtcagagtgccctcttttctccaaatgaccacatcacctctccagcaagggtttgaaactgggctgagatggctgaaatgacagaagtagacttcagaatacggataaaaacaaacttcactgagctaaagtatcatgttttaacccaatgcaaggaagctaaaaagtcatgataaagcattgcatgagctgacagacaaaatagccagtgtagagaagaatgtaaccagcctgacagaactgaaaaacacaataaaagaatgttaaaatgcaatcacaagtattaatagcagaatagaccaagcagaggaaagaatctcagagcttgaagactgcctttctgaaataagataggtagacaaggatagaaaaaaaaaaaagaatgaaaaggaataaccaaacctccaagaaatatgggattgtgtaaagagaacaaatctatgtctggtgtacccaaaagagatggggataatggaaccaatttggaaaacatattttaggatatcatccatgataactcccccaacctagctagccaggccaacatttccatttgcttggtagatcttcctccatccctttattttgagcctatgtgtgtctctgcatgtgagatgagtttcctgaatacagcacactaatgggtcttgactctttatccaatttgccagtctgtgtcttttaattggagcatttagcccatttacatttaagattaatattgttatgtgtgaatttgatcctgtcattatgatgttagctggttattttgctcattagttgatgcagtttcttcctagccttgatggtctttacaatttggcttgtttttgcagtggctgctaccagttgttcctttccatgtttagtgcttccttcaggagctcttttagggcaggcctggtggtgacaaaatctctcagcatttgcttgtctgtaaagtattttatttctctttcacttatgaagcttagtttggctggatatgaaattctgggttgaaaattcttttctttaagaatgttgaatattggcccccactctcttctggcttgtagagtttctgccgagagatcgctgttagtctgatgggcttccctttgtgggtaacccgacctttctctctggctgcccttaacattttttccttcatttcaactttggtgaatctgacaattatgtgtcttggagttgctcttctcaaggagtatctttgtggcattctctgtatttcctgaatttgaatgttggcctgccttgctagattggggaagttctcctggataatatcctgcagagtgttttccaacttggttccattctccccgtcactttcaggtacaccaatcagacgtagatttggtcttttcagatagtcccatatttcttggaggctttgttcatttctttttactcttttttctctgaacttctcttctcgcttcatttcattaatttcatcttccattgctgatactctttcttccagttgatcgcatcagctactgaggcttgtgcattcgtcacgtagttctcatgccgtggttttcagctccatcaggtcctttaaggacttctctgcattggttattctagatagccattcgtctaattttttttcaaagcttttaacttctttgccattggttcgaacttcctcctttagcttggagtagtttgatcttctgaagccttcttctctcaactcgtcaaagtcattctccatccagctttgttccgttgctggtgaggagctgcattcctttggaggaggagaggtgctctgatttttagagtttctagtttttctgctctgttttttccccatctttgtggttttatctacctttggtctttgatgatggtgacgtacagatgggtttttggtgtggatgtcctttctgtttgttagttttccttctaacagtcaggaccctcagctgcaggtctgtggagtttgctggtggtccactccagaccctgtttgcctgggtatcagcagcagtggctgcagaacagcggatattggtgaaccgcaaatgctgctgcctgatcattcctctggaagttttgtctcagaggagtacccagccgtgtgaggtgtcagtctgcccctactggggggtgcctcccagttaggctactcgggggtcagggacccacttgaggaggcagtctgcctgttctcagatctcaagctgcatgctgggagaaccactactctcttcaaagctgtcagacagggacatttaagtctgcagatgttactgctgccttttgtttgtctgtgccctgcccccacaggtggagcctacagaggcaggcaggcctcctcgagctgtggtgggctccacccagttcgagcttcccggccactttatttacctactcaagccccggcaatggcaggcgcccctcccccagcctcactgctgccttgcagtttgatctcagactgctgtgctagcaatgagcgaggctctgtgggtgtaggaccctccaagccatgtgtgggatataatctcctggtgtgccgtttgttaagcccattggaaaagtgcagtattagggtgggagtgacccgattttccagatgccatctgttacccctttctttgactaggaaagggaattccctgaccccttgtgcttcccaggtgaggcgatgcctcgccctgcttcagctcatgcacagtgcactgcaccgcacccactgtcctgcacccactgtccggcactccccagtgagatgaacccagtacctcagttggaaatgcagaagtcacctgtcttctgcgtcactcatgctgggagctgtagactggagctgttcctattcagccatcttggctccacccgccctgtactttcatttataacttgcttgttttacttaacaatgcctcctggaaattattccttaacaggtgtgaagtttatctagttctgtgtgtgtgcgtgtgcaggtacatgttgctttacatcctggtcaatatttagtgattacagatttgtaagtttttcttttattctgcaaagtaatatgctatttcgtggctttttaatttgcatttttgattactagttaggcttagcatcttcttttttaaaactgaagactagtgaaagttgaatcctggaagaggggagagtataacaagataaatctgttactgtgaaaaattaattgtgacaactcaataccttccaatgagcccagaatcttcttattcactggatattcaggtttgcttctgtaagtaacttgccaatatctcattttttttttgaaacaagttgtttaatatttattgatttttcaggagcactttacacaattagcttacaaattctctaccactaataagcattatagtccctcctcttaatctaaatatagtatagtccttctgtttatggtttctcagcttcttctttaggcattgaagactgttcctttctgggtgaaggagaatcacgtagcaattgggagcaagatgcatccatgtaacccagtactggaggtcaagatggagacaatctccacagccaccatggcctttccctgagtgctactataactcaggaggaaagccacccagatactgcagaacaccaacatgctgaaggtgagacatttggtttcattgaagatgtcaggcgggttactttccaggaagactacagcaaaggtccccagaaccaagaagcccaaatagctcaagacacagtagaaaacagtgatagagcccccattacactggatgatgattataccaggactatgggtctttgtctagggaggaaggagatgtttccaactagattccagagatggtcacttggatgagggggcaaaggtgacaacagaatgagattttagggtacccaacaggaccttgggtcctggctggccttgtagctttcccatcctgctagctggccttgtagcttggaaggccatgaccacagtgaaagttttggctgaagcagaagacacagccactgtgaactgaactgaaaaggtggcctgttcccagggttcaaagcatatatggaaggagaaagcttgacagtgacgtaatgtatttggagtgcaaaaatgcctgcagggaattcattctaaatggggagaaatacagaacaggccttaggaacaatgtgacctgggcattgtcatcttttcattgtaactaattacagactgcactggatttgtgagacatatgacagcaaaccttttctgtaaagggtaataaatatttacagtttgcaaaccagaaggtgtctgtggcaactattcaagtcttctcttgcagattgaaagccactgtaagcaatatgcaaaggagcagttgtagccgtatttagcaatatgcaaaggagcagctgtagccatatttagcaatatgcgaaggagcggctgtagccgcatttagcaatatgtgaaggagcggctgtagccgcatttagcaatatgtgaaggagcggctgtagccgcatttagcaatatgtgaaggagcggctgtagccgcatttagcaatatgtgaaggagcggctgtagccgcatttagcaatatgtgaaggagcggctgtagccgcatttagcaatatgtgaaggagcggctgtagccgcatttagcaatatgtgaaggagcggctgtagccgcatttagcaatatgtgaaggagcggctgtagccgcatttagcaatatgtgaaggagcggctgtagccgcatttagcaatatgtgaaggagcggctgtagccgcatttagcaatatgtgaaggagcggctgtagccgcatttagcaatatgtgaaggagcggctgtagccgcatttagcaatatgtgaaggagcggctgtagccgcatttagcaatatgtgaaggagcggttgtagccgcatttagcaatatgtgaaggagcggttgtagccgcatttagcaatatgtgaaggagcggttgtagccgtatttagcaatatgtaaaggaggaattgcagccatatttagcctgtgggccaagatttgcctgcccttgctctagatgacttagagaactcaacacctgcccacactgacccttccaatctgttcctggggattgtctgatactactgtcttggggaaagtctgagcatttttcccctcctccatccaaacccaaaatggacagagaaaactcactttgtgcaaaatggaaatccaaatggaaattggattccatttggatttccattttgctatggagactcatgcaacctgttctgtggccaactggacctagaaggatggtgttctctcagaatttgcaggataaagttacccaaagagtaaacatgagttgaatgtcaactttcagaaggaatcatttgaaagcccccctatcatctttctgtcagcaaaatgtctctcaaggcagtgcctgcattcaaagtagcagtggagccagcagggcagctctcactgcagacggaatgagaaaactggaggaagcagagttctaaggttagattgtcggatctccaggagaacgaagttcaaaaccacttttccttttcacaattctcttgattcttctcttagtatgagtcagggtagcaggtcacatcaatgtcatgaaaggaatactaatgataataatttaggatatttttggctacagctagagaaatctcaaacaaacaagcttaatcaggaaagcttttgacacatagttggaaatggaggtacttatgtgtttctgaaatcctgtttttattggcttctcattggctttttcatgatggcaaaattatacttagctgttagagccttcatatccatgaactacaatttctgtggaataagaaggagatatactggaactgaagcttttggtaacctcgaattttcattttggcaggcaaaccaaagagaagaaagactttgtgcttgagagttgaaaatgagaccaccttgccatgtcaattcaggtctcttaaagtcttcccttgcaggagaagagggaagtgaaaagatcttcttgtgaacagggtctggtgtggacctccagcaaactccaacagattaattcattgacagaatgggattgtcttgtgaaagggaaatatcttggatcccttcaagctgggaacccctcagggcaaatctgcctacttctgtcaattcatcaatctcattctccgtccagttttgtgcccttgctggagaggagttgccatcatttgtcatacacaagtatcaatagccaaattgatcacgcaaaagaaacgatatcagagattgaagatcaacttactaaaataaggcatgaagaaaagattagagaaaaaagaatgaaaaggaactaacaaagcctccaagaaatatgagactatgtgaaaagaccgaactacagttgattggtgtacctgaaagtgacagggagaatggaaccaagttggaaaacacatttcaggatattatccaggagaacttccccaacctagcaagacaggccaacattcaaattcaggtaatacagagaacaccactaagatactcctcgagaagagcaaccccaagacaaataattgtcagattctccaaggttgaaatatatacaatatattcaatataagctctcagtatttaaaatttagtagggcttggtgtcatttttagacccaggagtcaaggccctgtaactcaatgtcacaaggactttaaaagcacatacaggaagataacaaatgtaataaccttcattaaaaatttttttaacctcagttttttctaagcaataaaacataaaatcttctaggcaggttaccaaaaggcaaaaaaaaaaaaaaaaaaaaaaaaacccttctgcagtgcacagaatattatgttcaaaggaaacatttcctttagacctttgagaaaacactgttagcatcaggcaacaacaacaacaaaaaactggaacccaaggaaaacaaacttatatgacctgaaaatgagttgaaggagagtgttactattttgtgccttttaaaaagggagagaaaaccaaaacccgtgagatgcaataaaagttgaattttgggttaaaaattaaaaaataaaatatcttataatttattgagtaaatcaaccccttaagaaaatttcattgttctaaccaattctttagtgtataagtgttttcttacatcaaacccaatctacagaaacactactatcatttctctttatagacaacttaatcacataaaagtttttgatttgcttatttaataatcttcttatagtgacttatacagaccattcatgacatgcttggattttctggtttgttctaaatatcactttttcttaaacaactagtcattttattctaggactaaatttaccatacaagattctttctcatataaaattatttctctttaagctgtcttacaaaaaaaaaacctctttcttttttttgggggatgcccttaaataaatattttattttgtttatatcattgtagatactagtacccttagtttagtaaaagaaaactaccacatgatctttatttttaaattcttgggttaagctctggagaattttcataggcaaattctgtgtgggctggaacagtaagcactccaataaaatctatctccaggaagaatggaccacccactttatcagccaaggtgaatgctatagaagagatcttgtcaagcagaagctgactctgaacatcctgcactcttccttgattagggaaaaaaatttggaaaaagggatcttgacctcctgccagtaggagtccccacgggtgaacatgaagtaactatacatctgtttttcctctggattatatctgtgtcctccctgatattcatcatccaaggccaaccatccccacatacacggagatacagagtactgaactgggaccaatcataagacattttcctaagacatcttcctctcaaaagcaccccctggaatcctggatatcattgcacagtacccacttcaggtagtctccccatcctgaggcacctcagagctcagagttccatatagcagtgcactttggttattcttgcccattttcaaaaatacttcacttctgcctccaatcgtcttttcagaagtcactatctacttatccaagtcttctttcccccagaactgtcagacaaccttggcttgttccagcaagacctcatgcagagggcggccttcgggtcctatccaatgatccacaatttcatccttcaaatgcctaaaatggtcctttatttcatctctaattgctttattgaaactaacttcaggtttctcctcaggagaagttatatccaaagcaacttctttctggtgatgtccttggcaacccccttcagtattcctctgtgaggaggctttgccaggagaagccactagtttctgaagactactggagtggtgtgcaaagtgaatacccaaaaatgaatgcaaggtagcagttgtcttagagcattttctgagaatataagtgccatgcagcaatttgtgaaccaaagccatggtacgaaaaaatcaaaatgtaagtttcttcctgggctaccaagggctaccaagaagcttcagcaaatagcccaattctaccaaatgccagaagctgctctaagtgtattttcattgacggctcacaacaaccctgagagaggtactattatcatttcaattatagagatgaggaaatggatgttccaagactaatttacagaaggtcacacaggtagtgagtagtaaaactcttctgcctcggggtttgcctccggcactcactgcctgacttccacaggctggacgttccccacgctggagagaaaaacctctttatttctttaactttctttatatctctcttatttcctggttccttttaccttgttttatataaaacctttacataagctttgaattagacaaaagagtgtatacctttttaaaaagcacacacctgtttttagaaagaatgttttcctacaatatattttgttgaaaaatacccaaataataaaatatctattatttaatagtaatttagattttaaattatgacaattttatctacaagtattcatcccattacatttacctaattatcttatgttaatcacttacctacattgtttatgaaactgtgataggcatcatttaaaattatgaaaccaccataactgagacaataacaaagatctgacctaactgactccatcttgactctaacctccacactgtccttgttcattcctgggcataggccaaacaaactttgggaggaactcactttatatttagctttgaaacgaagatgataacagtcctttcccaaaaccaacttccttactgcctgtggactagaccacctaaagccacaagattagaagttacggtaatgttactaaattcaagatagagctatttttattaaaccaatatcaatgtcttatttattaaagattacacaagcaaaggtcattctgttttggctgtgtttatgcttttgcaacccctatgtcaagttttgacaccttatagtatttggcagg[353 bp omitted]gaggcaggagaatggcgtgaacccgggaagcggagcttgcagtgagccgagattgcgccactgcagtccgcagtccggcctgggcgacagagcgagactccgtctcaaaaaaaaaaaaaaaaaaaaaaaaaagaaaaaaaagatacaaaaaattagccaggcgtgttggcaggcacctgtagtcccagctactcgggaggccgaggcaggagaatggtgtgaacccaggaggcggagcttgcactgagcagagaacacgccactacaaatccagcctgggcaacagagcgagactacatctcaaaaaaaaaaatgcaaacaaaaatgtatgctggcaattcttaagacatttctaatattactttaataataattttaaagctagcttgtttattaaagattttactgaagtcacataaacttgaaaaagcatttgagtagtcttttctttttctgataatttgatgtacactttttaagccaattaatcagagctcttttatatattttcattagtgaaacattgtttacataacacataaatacacaagatatattagacatgcggaaagaagtacatcttcaccaattcacaaaaaccttcttttttgctatcatggattttcagattcttggtaacctgtttcacaactctaggcagttgtcagtgaaatagccttaaatttgcatattaaaggaaacaactcaggtgaaaatcaaatagaaaaatttgcattataaagtatggaaagaaagagtctggtgtgctagaaggagattaaagagggatgccaaatcaaacataaaattataaaaatttatcatagaatggtataaggagaccaattttatttagatagggattatctatcctttaactggctctctgagctctgggcagaaacccacactgaatgctgtgtttccaaaaagggagaattattatgaggctagaccatgtgatgtttttacagtgcacttagaaaaaaaattttgtaaacaatgacatttctaactgtctaaactatacacttctttaaaacccaaagagtagactttgttgtgataactattttagtcaataaatcaggtaacacaatacaaaagcaagcagtttaagagctgagatgaacttttctgtttacactcttggggtttgataaggaaaaacaggtgtctaccccaagggagttgcaccttctccattttctttaaggaacctcagactatgataaactatgtcacgttcctcatgcagcagagggtgcaagagaaaggagagacagcagaagtaaaagaagaaaacagaagtcagtcagctgagaagaaaaaacctttgctcaattaaaaaaaaaaaaaggtagagttgataaaacccaatggggaaaaaaagcaaaacagcaacgaaaacagaaacaaacaacaacaacaaaaaacatttaagcaaaacaaatgatcacacaacttatatgattatggagtgctctgatggtaacaagaaatgaagaccagctggttgctactcttctctttggccaagacaatccccaactcagttacttatctagggatcatgggtcacaggttgaagcctgctctctaccattaggggagcagggcaaaaaacctcatctttcctgttgaaggcaagctcaaactccataaaggagttgcctgaaggaaaacctggccttttttgtgttagaagcaagtaaaactctagaaaaaaaaaaaagaaaaaaagaacccacaaaaaccagagttgtacagcaaaataaactttagatatcaacggaattttgggtcctaatggtaccccattagctcagggggataagcggaagataaagcactttgtaatatgcattttagaaaaccaaggccaacctctctattacttttttttattttttattttttttttagacggagtctcgctctgtcgcccaggctggagtgtagtggtgccatctctgctcactgcaagctccacctcctgggttcacgccattctcctgggttcacgccattctcctgcctcggcctcccgagtagctgggactacaggcacctgctaccatgcccggccaattttttgtatttttagtagagatggggtttcaccgcgttagccaggatggtctcgatcccttgacctcgttatccgcctgcctcggcctatcaaagtgctgggattacaggcgtgagccactgtgcccagcctcaattattcttgttgtaaccgagcaagttacagagaaacgccacacgctgagacaaattcaggagtcctttattagccagagaccgagagacggctagtgctcaagattctctcggccctgaagaaggggttagattttcttttatactttggtttagaaaggggagtggggggagtctagttaaaacaatcttacagaaataaagcaggcaaaaagtaaaaaggataaatggttacaggaaagcaaacggttccaggtgcaggggttttaaatccatcacaaggtgataggcgcggggctttgggtgttatcaaccggacacaaacgcggggggctctgggtgctatcaactgggcaaattcctaggaactgcagatatagcttgccacagtatcttatcagttaattgcactcttggatgtgctgggagtcagcttgcacaagttaagtccttgaggaagggggtgagtaaggggctgtaagtgaaggagccaagatggtgtctgtctggctctctcagctaagggagagtcaattcaggttaaaacaaggtatcatactctaaactgtctataatggaccaaaagccagataagactcctgtagcctttatggaaaggcactaatagagtatacctccttatcccgtaattcagttgaggaacagctcatcctgaaggacaagtttattacacaaggcagctcctgatagtagaaggaaactacaaaaccaaggtacaggaccagacagcaccttagagagcctcctgaaagtggccacttcggtctttaataatatggaccaggaggaggatgcccaaaagaaagagagcaagctcgggagacggacagaggctctagcagcagctttgcaggcttgcaacatccagaatccccaaggtgcatctgctagttgctattgatgtggcaggccagggcattttaaggattgcccaggcagcaagacgaagcaacttcgaccctgtccagcctgtggcaaaaaccactggagatggaattgcccccagaggcggaggtcactgggttcaggaccagtttcacagacggtccagcaggactgatgggtcccggggctcaaatctcggctccagcggttcaaactgccattatagcacaggagctctggatgattctggaaattaaaggaaggaaagtaaacctccttccaaacactagagctagtctctctctgtcttctcctctctaatccagatctcccctctccccagagcatgaccgtaaggggcatctcaggaaaaaggctaatccaatctttttctcaaccttagttgacacacgcttgcaagccattgtcatgatagctctactagtcagaaaagcctccaagttaaccctaggaaataatttaactgtttacagcccacataatgtagcagaatcacggtcctctagggggagctcttagctgacagccagtaaagcaagatgtacataaggcaggataagcagtagtcactctccccaggcacaaacgctcaattagctgagctaatagctcttacaagagcacctaaattaagcaagggaaaggcagctaacatttacactaactccaagtatgctttcatagctctccatgctcatgctggggccatttaaaaggaaacacattttcttaccactaatggatctcctataaaatatcaccaggaaattagcaggttattatcctcagtttttcttccacaaaaaaatagcaaggatgcattttaaggaacattaaaaggaaacaaggtagccgaaagaaataaattagctgatcaggcagctaagtcaaaggcatgaaagcttcgaggtattaacacacttcaagccccttctaatctaaaaagactctgtaagagaaattaaacctcagtattcccctacaaaaatagaatagactacttctctagggcatacttttcagccctcaggatggctacagtcaggatggcaaactctatttgccagcctccagccaatgaaaagttcttaaaatccttcaccaagcttttcacttgggaaaggataaaacttatccatgtgctcagaaattgttttcaggcaggaaacctctaaattggttaagcatgtaacctctctagctcacttccagcaggaaccacctctatttaacccaagaaatttggtattagtaaaactctcacctctgtcaccttccctaagccaagctaggaagggccctacactgttgttctctcaacccccttgggcagtaaaagttacaggaatcaacttgtgaatacatcacgatcaagccaaagcctgcaaagctgaggaagcaacccctgacggtcca[143 bp omitted]gaaaccctgtttctactaaaaatacaaaaactaattcaaattagccgggtgcagtggtgggcgcctgtagtcccagctactcaggaggctgaggcaggagaatcgcttgaacccgggaggtggaggttgcagttagccaagatcacaccactgcactccagcctgggcgacagaacaaaactccgtctcaaaaaaaaaaaaaaaaaaaaaaaaaaagtagaagatcttaagctgaaaatcataaaagataagtaactgagtgagggctacgcatcttactcagtcccactcctaccttatcaaatactttttattatttctaaactttcctctcaaagttcactgccaaatattagaacttctttttaatgcatatttgcagagagatttaattattcatagaatcatatttgtaactttgtaaatccccaaagggacatgttatgtcttggcaagtaaagttttaaatgaaaattatttactatgccactcttgtgaaaattgttctagtcaagctactatttgcaatagaactaaacgctgtggcactcacaatgtggaattctggttgtaaaattctaattgctgtaatattttgccagattatcatccttataacaggattaataattgcaggaaaaatttagtcaaggttgttttgcttatagcaggactaatagttatggataagaagcatgaaagttataccatcactaagtttgaaaagactttttactaaaggttggtaatataatacacactatgaaaaggttataaaggaagagattttatgtacggaaggattttgtatggtaaattcttgtactaaagggaaataaccggttgtttaaagaaaggatgtttaggacaaatcaaaaagtgtaaaggtgttgtaagaaggtttataaaagtcataaaagaatttagtaattaaaggaaaggaattgtcaaaattaacgctaaagttattttagccacccaataatgtctttctcccaatcatattgcaagttgtaaaaatggcctaggcctaaagttattctctaacggcagattaagggggaaatgtccgcttttctctaggaaaaagttaccgctatattaacgtttctggtaatgtacaccgacatctagtggaggcaagccagtattgcaatccattggtgtaactaaaaggtgtcaaactctactgtcagttatggtctaacagggccccccactaacggtggtaattttaataattgtatcctaaccctacattttaaatcttcttgtaaaatttatattttttcaccttaaatcaaataaagtttaatattttaatattttattaaataatgttttatttaataaaacattaaataaagtttaatagaagcaattaaactttaaatggtgctgtgagctgagccacacacagacatgccattcttctgagaacctcagatcaaccacaggagaaggcccaattgctgtccccccccaaccacacgccccttttcagcagacagtacccagaaagaatcatcatctaacaccccctaacagcagttaggtttacttctctttgagggggggatattacaggagttattaagaaatcattttaggcatacagtaagggtaaaggttcttggtgaaaattttcctgtaataagaaatctcttttctaaccaagcaatctcttttctaaccaaaaaggcggcttcaagggccgggctgacaagctttgatatgcaaatgctggccactagaaactgggtccactcaacatggtgattcccaccgtcttctccttgttaccacctgtgcaaagtgtgaaggccacctccaagtaacaccatgtgttcaaaccatcatggcaacccacatttgcatattaaaaggctatggcgggagggcctggtttctcccaggctacatgaataacacacctggtcaagccaatcctttgggccctatgcaaaccagatactgcctcctccagcctccagatataagggactgtctttctgttgcgcacagggtctatctctgttcctttcccatgtctcagtacgggggagctgttctcttctttcttccttcttacttgctattaaacttttcactccttaaaactactccacatgtgtccatgtcgttaatcctatcagcaccagaccaaaaagcctggtaatcgtccagtcatcggagctgtatcaaaatgaacttgggctgctctgtcccaatgtctccatcctttgcatcttaacctgtcgcagaacaagaaaagtggtgccgctaagattgcacaggtgcagcgaatacgaacctgggaagactgtggtgtttctttagatggctggtggatctatctggattgaagggattccttttcccagcaataattttacagacctgagacgtttgcaagatgaaattgtgttgcgggatgaagatgtcattacactttcttacccaaagtcaggtagggaagtgggacccgaaactcaggaagggatgcggtgaagatactgatggagtgccttctttatgccctgcgcttgggtatgctttggtggatagtgtggggtttttttgtttgtttgtttctttgtttttgagacggaatctcgctctgtcacccaggctggagtgcagtggcacgatctcagctcactgcaagctccgcctcctggattcacgccattctcctgcctcagcctcccaagtagctgggactacaggcgccgatagtgtggtgttttaacaaagcttctactcagagagacggattaaaccagacaattaaacataatgcaaatgaatgtgattactggggcactgtagagacagagagagacatgagatcccacagaagctaaggcagatttaagtgatcatgcaggatggttagaagggactgattattgaaagaatttcggtgaaaaaataaacatttatccttagatgctgagcgtgaatgtgagactgttagatgtaaaagaaaaaatattctgacacttgggtaaatggtgaggaagaatattcaagacaattgcaacaggggagagagacccaactctgaatatagcaatgatagttggttttttgtagacaattatcaaagtaaggcggtcagtgggtgggaaattacaaagaacaacttgattaggtatcaggagcagaatccttgctaaaggcaggccaaagatttagacattaagagtggaacatgggaaatctgatcaggtatcaaggatggggggattctcattacccttgttgaaactgggtgcaacacagtttcaacacagatgtccaaagtccaggcctagtcaggaagaggactcagggaagcccaagtcaagtctggtcgaggagaaggtctttgccagatggcagtgtttcgatctattacactacagacattgtgggccacataatacattttcagggggaagagggctgtcctgtgcattgtaggatgtttagctgcatccctggcccctgcccactggagtcagtagcatactcaagtgtgataactcaaaatgtctgcagtcactgttaattttcccttgaggtggacacagtttaccccagctgagaaccgcatggatgaggagaaggcacatacatatgcctgaggtttcaggcaaagaatagtagacatgtgttggtgtcatgcattgaggcagagatcgctggtggagaagcacatacagggaagctgggattatcgagtgtaacggatactacagtgtaactagagaaagaatatgaaaggtgggaaaatgggagtgaaaatattgtaatatttagcaagtgcatgtgtgcagtggttcaatggtctattctgtgcattaagactatttggtgccattgttttactgggctgagcttatttcacttaacataatttcttccagttccctccctccatgttggctgcacatgacagttttgctctttttaaaatgatattgaggccgggcgcggtggctcacgc[131 bp omitted]gcgtggtggcaggcacctgtagtcccagctactcggaaggctgaggcaggagaatggcatgaacccgggaggcagagcttgcagtgaaccgagatcgtgccactgcactccagcctgggtgacagagcgagactctgtctcaaaaaataaaaataaaataaaaaataaataaataaataaataaaatgatattgagcagtgggagcaagaatattagggcatccaacagcccaaaggtggaagcagcccacatgtccatcgacagatgaacagataaacagaatgtactctatacaaacaatggaatattagtcgcccttaaaagagaggaagttctaatacatggtaccacatggatggaccttgagggcactatactatgtaaaagtcaggcatgaaaggataaatactgtgtgatccagtcataggaggtacctggtatagaaatattcatagagagggaaagtagtgtggtggttgcgaggagctgatgggaagagaataaaaagagttgctttttaatgtttacagagtttcaattttgcaaagagaaaaacattctggagatggatggtggtgatggttgcatgataatgtgcatatttactgaaccggacacttacaaatggttaagccagtcaattgtttgtttgtattttaccacaatttaacattttaaaagttggttttttaaaagagtattatgacaaaacagggtaaagatggccacataaaggtgaaaggaacagagtacctctagaataaagcatcagttgaatgcacttaagactaagatgaggaatgaaaacaccagttggattgatgggcaggggcattattgctgaaataacacagggtctttaagatgtagtggtggggtcaatgtcacattgaagtaggtgacaccttcttcttttttattcaggaagcttttggatagtggaaatcatcagtctgatccactccaagggagatcctagttgggtccaatctgttgttccctgggatcgttcaccatggatagaagttaaacgtaagaaagcaggtttagagagtcagaagggcccacacctctacacctcccaccttcccattcagctcttccccaagtcattcttgaattccaaggccaaggtgagttaataatggaatgtcagcgtggaccactttctgacggctgaatgactgtgttttagggacagagttaaaatgcgattccctaaactatgcatattagaaaatcttgttccaatctactgtgtcatatacaagacaatgtttctggtatttccccaggaaatcctcagccttcatttaagtaaatcctggctacatccccaaaactgaggaccccaacattaatatgctcatgtggaaagcatcttagctgtaaaccagcacctgaatttcagaggaaatgtgggtgtgacactgatatttgaaacccaacgtggtttttctattgaggatagtaatcatgatgtggggcattttgttcccaattgacagctccacgggtctcccatacataatttcagaagctccacatgaagcctctagcattgagtaaccctgggcagtaagtgtgaactttttctcatgatagattattgcttaaatcaaaacttaccaaaactatcaaaattgtataaaactgcctccaaatgtctcaggtgatgtggtagtaacagtattatcaaaatgttctaatattacagtgtcacaatgtattaatactgtgctgtatttctatttgcttatttactgtcaggttcatttattttactgtatactccatgattttgaagatcatgtcaatttttttcccaatttttactgttttacactgacttagctgatgcttaaaacattgtagagatacaagaaaatactggaaaaactaaattaaaaaataaagtaacaacaatagcccaagaccaagctctgtaaaacaattatgactgtaaaacaattatgataaaatgatttataacagaaaattccaacttgaactttggctccagactgtgtttattggcaaatagtgcaagatgtttgaagcgcagtttgtgtgtgtttaaactggcagtactgatccttccatgtatttgttcctgattatttattaacttagaatatgcatccattctttattccttcatatgtttaggtattaagcacctattatgggtcaaggtttgaatcaggattgggaagaaggtaatgattatgatgacctcaagtcacaacctaaagaaatttacagattagtatttgggaagacaaagaacagacatacacttattttctgtggtgccaatattatttactgacatcctcattaataccagataccagtgtgtagttggtgaaaaacatctactttaagatatgcaataaatagatgaaaggatgagacagggagaaaaatgtagggaaagtaccacattgtcccagaaggtaaatgcagggtttgctgatggagttatgcagatggaggatttggtaactgtcttgtagcgggacaatcagagatgggagagactgaacagagttcaggagagcctttattaaggtgagcacctggctcagtaggactagcgtccaggaaagtctgagccccgaacaaagagagcagccaccttttaaacaatcagtggtgggaattacgtgatgcaggaagcgtacttacagaagcgagaagaaaggcagttgttactccatgtcttacatccttgggaatacatggttgtgtaatatatacgtatcaatcttatgaccttgcagctgtgctggggaggtaagcaagaattcacagagctctaaggaatgtgaaactggggagtatagatgaggctcatggagcacagaaggagcacaggctgttaatatccttctctaacttctactacggggtggggacgggggcgctaccttataactaagccctgaggggaaagttaattttctggcttcacatattgtaaaattcattaatttcctcttcagtctcagtgaggagaaaaccaagagtgtataactgattccatttaccccatatccttctttgtgcaattcttataatttttacttttgcctgcagtataaaaactgcctgtggggttattgttctttaaagagtcggtagtgttttacagcaattccatcaggaaagaaaatgttgtcttttatatatactcctttactgcttctcaggttcatccctggacctgcactatgattcctgcagactgaaggagttcctttagaactggttgtcatgtaggttgtaggcaataaaaattctcatagcttggcatgtttctaagattaccttgatttttatcctcatatttaaaggatattttcataggatatagcattaagtattttttattcttcagcaatttaaagacaattttccatttgtgttaggcctccattttttggatgagaagtcagggggccttcttctcctctttctccactgtctgtgacgtgtctgtttttgtctggctacattcaatgactcagctggatgccaagggtgttaaggaactgttcatagtcactgctgtgtgttaacaagtttggagagtgaggaataataaaacatatcactgctatttggtaaatgtctggtgatcttgcctcatgcatgcgaagcccagccctcagccataagtgtacagagacccctgacacagactttatcattacataatacttacacatgttttgttggtacacgcagtattttgatacatgcatacaatgtataccaataaaccagggcaactgggactccctcaccccaaaccttcacccatctttatgttgggaacattccaattcctcttccccagcaactataccacaaaatattgttagctatagttctactgtactgtcaaatactagatcttaatccttctgtccacatgaaaaaaaatcaaattcaaattgaaggacatttgataaaaaaatttgacaagtgctcttcaaaactacaaaaacaccctgaagtacacagaccaacgacaccatgaagcaactagattaacaagtctgcaaaattaaccagccagcatcatgatgacaggatcaaattcacacataacaatattaaccttatgtgtgaatgggctaaatgcccccagtaaaagacaaagactaaaaaattggataaagaatcaagacccattggactgctgtattcaagagacccatctcacgtgcaaagatacacctaggctcaaagtaaacggatggaggaaaatttaccaagcaaatggaaagcagaaacaagcaggggttgcaatcctagtctctggcaaaacagactttaaaccaagaaaggtcaaaaaagacaaagaagggcattaggtaatggtaaaaactttaattcagcaaaaagagccaactatcataaatatatattcacccaatacaggagcacccagattcataaaacaagttatttttattttgttttattaggactgaatctctctctatctcacaggctgtactgcagtggtgcgatctcagcttactgcaacctccacttttcaggatcaagtgactcttgtgcttcagcctctcaagtagctaggattacaggcgcccactaccatacccgtctaatttttgtattttgagtagaggcagggtttcaccacgtaggccaggctggtctcggactcctgacctcaagtgatccacccgcctcagcctcccaaagcgctgggattacaggcgtgagcctccacgcccagcccataaaacaaatttttaaagacatacaaagagacttgaatacccacccaataatagcgggagactttaatacctcactgccaatattagacagatcatcgagaaagaaaatttagaaagatattcaggacttgaactcagccctggatcaactggacctgacagagatctacataagtctccacccaaaaccaacagaacatacatttttctcagtaccacatggcacttactctaaaattgatcacataattagaagtaaaccactgctcagcaaatgcaaaagaactgaaatcataacagtctctcagtccacagcacaatcaaattagaactcaagattaagaaattcactcaaaaacacgtaactacatggaaattgaacaacctgctcctgcatgacttctggataaataataaaactgaggcagaaaccaagaaattctttgaaactaatgagaacgaagagacaacataccagactctctgggatgcagctaaagcagtgttaagagggaaatttacagcactaaatagatccaacaaaaagctagaaagatctcaaatggacaccctaacatcacaactaaaagtaccagagaaccaagagcaaataaatttcagagttagcagaagacaaggaataaccaagcacagagcacaactgaagaagaaagagacacaaaacacccttcaaaaaaatcgacaaatccaggagctggttctttgaaaaaaaaaatcaataaaatagatagaccattagctagactaataaagaaaaaaagacaagattcaaataaacacaatcaaaaatgataatgatgacattaccactgaccccacagagatacaaactactgtcagagaaaatgataaacacttctatgcaaatcaatcagaaactctagaataaatggacacattcctggacacatacaccctcccaagactcaaccaggaagaagttgaatccctgaatagaccaataacaagttctgaaattgaggcagtaattaataacctacaaaccaaaaaaagcccaggaccagatggatttacagctgaattctactggaggtgcaaagaggagctggtacatttcttctgtaactattccaaacaatcgaaaagaagagactcctccttaactcattttatgaggccagcatcattctgataccaaacctggcagagatatacaacaaaaaaataaaacttcttgccaatacccctgatgaacatcgatgtcaaaatcctcaataaaatactggcaaaccaaatccagcagcacatcaaaaagcttatccaccatgaacaagttggcttcattcctgggatgcaaggctggttcaatacatgaaatcaataaacataattcatcacataaacagaactagagacaaaaaacacaacactatcttaacagatgcagaaaaggcctttgataaaattcaacatctcttcatgataaaaactctcaataaactaggtattgatggcacatatccaaaataagagccatttatgacaaaccgacagccagtatcatagtgaatgggcaaaagctggaagcactccccttgaaaacgggcacaagaaaaggatgccctctctcaccactcttattcaacacagtattggaaattctggcaaaggaaatcaggcaagacaaagaaataaagggtattcaaataggaagagaagaagtcaacttgtctttgtttgcagatgacatgatgctgtatctagaaaaccccatcaactcagcccaaaaacttcttaagctgataagcaacttcagcaaagtctcaggatacaaaaccaatgtgcagaaattaaaagcacttctataaaccaagaacagacaagcagcgagccaaatcatgaataaattctcattcacaattgccacagagaaaataaaacacctagaaatacagctaataaggggaagtgaaggacctcttcaaggagaactacaaattactgctcaaggaaatcagcgaggacacaaacaaatggaaaaacattccatgctcatggacaggaagagtcaatatcatgaaaacagccatactgcccaaagcagtttatagctttaatgctattcccactaaactaccatctgatcttcaacaaacctgacaaaaaccagcaatggggaaaggattccctatttaaaaatgatgttgggagaactggctagtcacatgcagaaaattgaaactggaccctttattacaccttatacaaaaattaactctagatggattaaagacttatatgtaaaaaaaaaataaaaactatagaaactctagaagaaaatctaggcaataccatacaggacacataagcatgggcaaagattttatgatgaaatctctaaaaccaattgcagcagaagcaaaaattgacaactaagatctaattaaaccaaagagcttctgcacagcaaaagaaaactatcatcagagtgaataagcaacctacagcatggaagaaaatttttgcaacatatccatccgacaaaggtctaatattcagcatccataaggaacttcagcaaatttacaaaaaacaaaatgccattaaaaaatgggcaaaggacatgaacagacacttcttagaagaagacatacatgtggccaacaaatgtgaaaaaaaagctgaatatcactgatcactggagaaatgccaatgatcactggagaaatgccaatgaaaaccacaatgagataccatctcacaccagtcagaatggcaattattaaaaagccaagaagcaacagatgctggcgaggttgcagagaaataggaatgcttttacactgtttgtgggaatgtaaattaattcaaccattgtgaaagacagtgtggtgattcctgaaagatttagaaccagaaataccatttgacccagcaatcccattatggggtatatacccaaaggaatataaatcattctattttaaaaatacatgcatgtgtatgttcattgtaacactattcacaattgcaaagacacgaaatcaacccaaatgcccatcagtgatagactggataaagaaaatgtggtacaaatacaccatggagtactatgcagccataaaaaggaacaagatcatgtcctttgcagggacatggatggagctgaaagacattatcctcagcaaactgacacaggaacaggaaatcaaacactgcatgttctcacttataagtgggagctgaacaatgagaacacatggaaacagggaggggaacacacacactgtggcctgtcagaggagggcatggttgggaggagagtatcaaaagaaatagctaatgcatgccaggtttaatacctaggtgatgggttgataggtgcagcaaaccaccatggcacgcatttacctatgtaacaaacctgcatatcctgcacatggtctctggaacttaaaaaaacaaaaaaaaggcagggtgcggtg[131 bp omitted]ggtggcgggcacctgtagtcccagctactcgggaggctgaggcagaagaatggcatgaacctgggaggcggagcttgcagtgagccaagattgtgccactgcactctagcctgggcgacagagtgagactccgtctcaaaaaaaaaaaaaaaaaaattaaaaaacccactgaaaatgtgtctgtaatttctttaataaatattgtacccatgtgaatttttaaggttcacagatataccacacttaagtatgaaagtaacattatgccgggcactatggcttgtgcctgtaattccagcactttgggaggccaaggtgggcagatcacctgaggtcaggggtttgagaccatcttggccaacgtggcgagacccccacctctactgacagtacaaagaatcagccgggcatggaggcatgcgcctgtaatcccagctacttgggaggctgaggcaaaagaatcacttgagcccaggaggcagaggttgcagtgagccgagattgcacaaaaaggcaacagagtgaggctccatctcaataaataaaataaaataaaataaaaaagatggccggacgcggtggctcacgcctgtaatcctagcactttgggaggcccaggagggcagatcacgaggtcaggagattaagaccatcctggctaacacggtaaaaccccgtctctactgaaaaatacaaaaaaattagccaggtatagtggcaggcacctgtagtctcagctacttgggaggctgaggcaggagaatggtgtgaaccagggaagcagagcttgcagtgagccaagatcatgccactgcactccagcctgggcgacagagtgagactctgcctcaaaaaaaaaaaaaaaaggtaacatcagccaacgctgaagaacatgtatacgggaactgcctgtaccatttttacaactttttagtaatccaaacatattttaaaatacaactactcaagaaaaaagaaaaaaatttactacttcataaaagcattttctaaaatgattaatgtcccaaagttatacattcctgtaactctcagtacctctgcatttttaatgctccttgctgtttatatatttcagtggttacctgcccatatttctctagttttcaggtgagggatatgacaagagcacacagatctaatggattttaaacagtgtatttgtctctgaacagcatcctcttagaaacactcacctctattactcagattacacatttgccagataagcgaaatgaattcatcctcttcctacttctctttttctcttcttctcgtcttccttctctgctgcctctgtctgttttctttttccccaaagtgtatttatcctcatgttctcatgcttgtggttctcatcctaggacataagagccagtggagtattgctataaagatatctgaaaatgcagaagcaacttcaaaactgggtaatgggcaaagattggaagagtttggagggctcagaagaagacaggaagatgaaagaagtttggaatttcttagagactgttaagtggttgtgaccaaaatgctaatagtaatatggacagtgacgtcctggctgctgaggtgtcagatggaaatgaggaacttattgggaactggaacaaacgtgacatgtgttatgccttaggaaagaacttggttgaattgtgtccatcctttaggactctgtgaacatttgaacttgagagtgatgatttaggttatttggcagaagaaatttctaagcagcaaagtgttcaagatgtggcatggctgtgtctaacagcctatgttcagatgtgtgagcaaataaatgacctaaggttggaaattatattctatttaaagaggaagcagaccatagtagtttggaaaatttgcaacctggccatgtggtagaagagaaaagcctattttcaagagaagaattcaagtgagctgctaagcaaccacttgatagagaaatttgcataagtaaaatgcaaacaagagctgatagcaaagacaatggcagaaaggtctcaaaggcatttcagagacctctgcagcaacccctcccatcacaggcaatccatccatccagtaaagctagaacatggaggaggggatgaacagctggagagcttctgggcaggaaaaaaatccttaagtcaggcaaagaatagattgaggagacagagaacctgaagggtgacagcactttttaaagctcagtggtcctctgcaggactttttgaaccaagcaatgtagagacagcttaccatatgaacttatgttgttactcaagaaagttgagaactaaataggttttcagctattgtaggccaataataaatcagactgtctattgatattacttttgcttcactaagaaaacaggatactactacagacacatcagaatgactacaattgaaagaacgacaatataaagtcttggaaaggatgtggaatgactggaattatcatacattggtagtgaacatgttatatggtacaaccactttggaaaactgacagttttttaaaaaattaaacacacaactatcccatgaccctacctctattacaagagaaaggagtgcacatggccatagagagatatgttcatacagctttattcacagcagttaaaaacttaaaacaagctggatgtccattaatgagtgaatgcataaactaactggtacattcatgcaatggaatgctactaagaactgttgacgtataccctacacatatgaattgctaacattatgctaagagaagccagatgcaaaagaatacatattgtatactattctaagaaggccaagaactggcaaaatgaatctatgggataaacatcagaatagtggttcttctaagggggtgatgaatgggaaggagctcaagggaagtttccagtgtgatggaaatattctttaccttctaggtgatggttacatgggcatacacatcatcgtgctgtacacttaagataggtacatgatacttcaataaaccatttttaaaagaaaacatccattcctggaaacagaacagacacatcacacataaacaagaacgctttgttcttatcagaatgtattacttcatttaaagtcatggtttggccctctggttggtagtggaggccctccaattcctatgacttgactaattattgttgatcttgagaaatgtacataatgggttgtatttgtttggctatagaaaaaagatgagatttctgtcttagcaatctctttagccgactgcctatggtacatactggattctggtgtaatgcttattcaataataaaactgttttctttcccttctacctttgtagcgaggttttctgggttggcaggaagtttctgtttttatttcctcaacaatagacacgcagtttccctatacaacatggttaaaaggcttaagcagctaaaattcactacctgctattcaaagatgagtctcatatggatacaaaagtgaacgtgtttaaagacattactgagacttccagtttctggtccagcaaggagctggaagtcctcactccatcctaacaacaaataaaaagctgaacaaactgaaaaatcagcaattcttcttagatctgtcaaataagtgaggtcacaaggcaagctactgcctccaaagttggagacaggcagacacagagaatgataacttaccagagcagaaactcacaagcagtaatctttgtgcctctgcaggaaccagaacaaggttaggaaaacctgaactctaattgatgaattgctggaagctgaatgtggttaagtctgagaattaaaaactccaagaagaccttgccatagagctatctttacactttcgtgagttttatctccaaggactctagcaggttctcacagtgaagatctgagaaaagtccccagctggttctggcaggggaagaggaagagtagccattttgaaatataccacggcattctgttcaatgctcaggagagaaactattttatcagagcctaccgtcttggggttttatcagtgtccaaatgacctggaagaaggaaaataaacaattctggtcccctcttgccaccctgtcccacttaaggggaaagggttttactcggaaggacttgtgaaattcatagtccctgggctcaggataagagactgaaacctttgggagg[135 bp omitted]gaggcaggaggcgg[137 bp omitted]gccgaggtggctccagtagcctgaattcttaacctaagcaaacccaaacccaactcagtgtaactggccttaaccaatcagaaaccaccaattaacctcctactattgacttcccactggaatgatccaaataaggctctactctaaccaatcaagtattttctttgccttgtttctgagttcagcctgtaaaagcccttccctcatgcctcttcagagaggccctaagctgcatgtgatctggcaatgcccaattcatgaactgctatctgcttaaactctttaaaattttaatgtgcctaagtttatatattatttttgcagaccatagaacacttcccctctcacaaccaaatcttatcaccatgttactaaagacctatcatgcggctcattttaccaagtacatcatattcagctatcaggaaaaaattacaaggcactctaataggcaaaatacacagattgaagattttacttaactcattaatgagaaaaactggtgacgtattaaaaccaactcataagagaacccttccccgagccgaaaaaaagtcacatttatagatcaagaatattaaagtggctggctgcagtggctcatgcctgtaatcgcagcactttgggaggtcaatgtgggaggatcgcttgaggccacgagtttgagaccagcctgggtaacatagtgagatctcacctatacttaaaaaattagccgggcatggtggtgcacacctgtagtcccagctaatcaggaggctgaggcaggaagatagattcaatccaggatgtcaagcggtcgtggctgcagtgagctatgatggtgccactgcacttcagtgttggcaatagagtgagatgctgtttcttaacaaaacaaaaaaaattaaaattaaaatgatatgcagcagcaaaagaggcaaaaactggcctcctcacaaatggagatggaggagggaagtaagctgagcctcctccaatttacttttctgtaaacaagaagtaatttgaactgccatcagtgatccacaatgtgagttggtaaatagctcaaaacaatgacaaagtagaatcaaatgacctaaaagcccatgatctaaataatgcactgaagcacagtttctccattcattgcttattttgtgccaggcacatttatgagcacttaatcctcgcaacactattagctaagaaatattgttccgtgcacacatgagcaactgaagctcataaagattaaacaattaagaaaaagtcacacagcagacacactctacagctcaagtgtcaaccaaacacccacagagatgcatatagggtcacatatcaaatcacataacctcacggagaatgggcctaacctcacggagaatggggccatcagatacaccaaagcagacgctcggtggtcccaaccacctctcataacactttcccaaacttaagacgcacatgtccacgccaatgtattatcataggcccttccccccctcttaaagcctcccacgaagtctgaacctggtactgatatacgcttcagccctcagaaggcaaccgcttgattctctgcgcaggcgcagcgttctcaacaccgccaacgggcacaaagccacgcccccacggccgaactcacgcctacgtactcagtcaccagcggaaccctctccaccaggctccgcgtcgaggccctacggggcgtcaatacgcacgcgtactttgtgtcccaggtagctcgtctcttagccatgtacgcctctgcattccggtcactgggagcggggccgtgggggctgcacatgcgcactgcgagtcctcgcctactcccagaaaccacccgggcgcatacgcggtgcggccgctgcttcaggtcggcgggctccagggagacctgggtgggcagcgtcgccgtttctcctttcttgggcagtatttttcccagcgccacgcggaggctgggccattatgaggtttgtgttgcgtcggggcggtccgtctcagaggcgctccggggaggagtgggcggctgaatggccagaggcccagggatccgttcaggtcagcgctggcgtccgggcctgagtttggaggtggcgggtgccttacaagaatgctcgcgtgatcagtgtgttggcgtttgtgtacacagaggacattattaaaattactctttgtgtgaatggttctatcccagagtaggccactggggcattgaaaaaagcccagttacatttttaggaaccagagctgcacgctaaactgttttcttttgacagtgaaatctgtcgtttttggagtttgttaggaacatggttgaaaatgggtggcagtgggttcgagaatctcgtctttgaagttttcttccttctccttagctctgcatttccaggacctggtcactattcaggacacggttccagcgcagtgcgcgttagccatgtctcaggtaagtttttgtcctgcaacatcataggttttaagtcctgggcacatctaattttgcttacttgggtggtaaagactgacaccggtacaaggctcaggtcttttcattcagcaacacgtgggactatagcaacctctcttctcagagtccatgtcctgtactttagtgttcatttattcactgaatgaattaatctgagtctccactgtcaccagtcttcttttaagcactgtgtggtgggtcagagatacattccctggagaagacaagagcctttatccggggactgtcgtcttcctgaagtaggggtgaatactcagtcatctttgaattcctttacagctccagactgagaggacgcagcatagaaaatgcttatgagtggttcagactcagtaatggtaatctgcctttggaaattttggggaatgggaatgtgattgatatcttaagcatgaaagtccaggttaacaaagtcaggccatttactaggacattagtgaaagagagtgttgtggatcacaggttccagtttgacgttgggcagcttaaagtcacaggcttcatctgtggaattccggaaaatacctattggctttctgtaaatgaggaacaagaagtatgctgcaagggagaagatggatgagctggctatatttcccaaaaaagggttctcttcagggtgtttgcatggtctctgaaattttgtgcaaatacaaccagatttgattcttagcccgctaaatgtagtcaccaagacattttgtttgaaaaatagattttcttctcaaaggggaaacttacattttcttttagggaaacaggcagtattttccctacacattctgtttgttatgatgactcaagctgttcatgaagttgttaaattatatttatgtattttaaaagaaaagttgttaaaaaaatttcaaccgtcatataacaaccatgcagaaaaaaacatttttaccactttattgtttctgtattttgatgtgaagtatttgagcttaaggctttttttaaccaccagttcttatcccatttcctccatacttccaatgcttccttaactctgttgatattttcaccatcaagatagatttccatcacttctgcaagtatttttcatgtagttttccctgccctggccctcagaggaaactaatttcttgttttgatgacagtggatttgttttgcttggcttcacgtaaatggagtcaagtagtcagtaggtgtgtgtctggcttcattaactcaacataatgattttaatgttcattaatgtccattatttgttgttgttttgctgagtattccattgtgttaatatattacagtctacttactcattttcctgttgatagacatttgggatgtttctagatttttggctattattagtaaaactgctatgaatattattgtgtaggctgagtatcccttatccaaaattcctgggaccagaagtatttcagattttggattttttttgttttgttttggaatatttgcattatacctactggttgcgcaacccaaatctgaaatccaaaatgttccatgagcatttcttttgactattacatcaacacttaaaaagttttggattttgaagcatttcagattagggatattcaacctgtatatgtctttttgtgatcttttagaagatgtagtggtagaaaaaatactggcatctgggcacagtggcgcacacctgtagtcccagcaacttgggaagctgaggcaggaggatcacttcagcccagcatttcagcaccatagtgcagcacgatcacacctgtgaatagccactgcattccagcctgggcaacataacaagactgctgtctcttaaaagaaagaaaatactggcatttgaagaatatcaagaaaaaatattcatttaaaatattgtagtctgcctcatttatggtgacagaattcaggatagcaagaggtgtgtcttgaagcaatcttggggaatcttggaggtgttggtaatattcagtttcttgatcggggatctgctgatgggtgtattgcgttgtgaaaattgatcctattggacatgaattcatcatattgatcatggcttactgcagcctcaacctcctagattcaagcagtcctcctgtctcagactcctgagtagctgggactataggcatgtgccaccatgcctggctaatttttttatttttttgtagagactaagtcttgctgtgttgcccaggcttgtcttgaactcctggcctgaagcagtcctcctgccttggcctcccaaagtgctggtgtggcaggccatgtctcaccaaatgcaggtgtccataacagctgtttcagtactgactgagtggttaaatattaaaagccactacccttacaaagaggctggaatgtaacaaaagcccaccaacagttttgcctcggcctttcctgggccttaaagcatgacaaaataatgaaggagttcttaactggacccatttaggatgaaacaagttttactgggggtctgaagaaaccccccacgcctccacaaacaaatttattggaggtctgaaggaaatccccaaaccaccgtggtttagcaggagacaagataagggtaatcactccagcaccctacacccatttagattaagtaaatttgctgaggctcctgaggaaggtcttcaagactcagaccttggttatagattaaaagaagttaatcacttgtctttagatgaatgcacacctacacatagacatatagcttagaaggtatataagctctggaaaactttgtaattgtgagttggtctggcagtaatttccaggccttctccctgtaaccggctacagaaataaaaactcccttcctccccagttaatctgcatctcgttattgggcctcaataaatagcagcctgaccctcagcttggtccaggaacactgggattataggcatgagccactgcacccagagatccttaagatttcttaaaccccacattcaagtgagaaaagaggaaccttctctgccccatgtttaatacaattaagtttcaatagcttttgacctatgtactgttgttacagatggtgcaagggtgtatttggaaaggacaacacagggcagctgtatatgattggagtgattgggaatcatagttgtattatgagttgatgaagtcccaggatattggaaaggaaaactaaccataggctgggcatcctcagttcttcccaccttcttcctaagtagctgaggatgaaaccttattctttgctcctgttgcacagcctgatggaggcaaataaggtgaaataataacacatctgctgcagttttcagaccattacatctactaccctaaaatgtagctgctagagcaaagactactttatttcctatgattctatgggtgaggaattcacactgaactcaacagggtgggaatgattaatctctgatcctatgatgcctgccagggcctgaatccccaagatgtcttcttcattcatgtattttatatttagctagaattgctggagtcatgtatctgggccactgttctttgctgctagctgagttactcagctttacttgatgtagtctcagaatgtctcactctccattggcaacgtctcattgtcttttcttatgtgtcatgagcccctatgagggcaaaacagaagatgccaagccttcctgaagctttcatctggaactagttagtgttagttctgtcatattctgttgattaaagcaaattgtaggtccgatccagatttaaagaaagaggactacactttgtttcagcaaaaaagtaatttgtaagttattctgatacactacagatccatggtagaattgatcatgactggctttcaacaaagtcaatgtgtggtcatactatgaatatgtaagattataaaatcaactatgctagttcctttacaaattggttttgaatacgtggatacacaatctctgagcaatacatttcttaaattattcagtgttttttgaatcaccctgttcatcttgaatgtttcccttattaagtatttttctatacccaaattttaataaacactatttcacagtattgctctttagtaacttaaataagctgcttttataagacaaagagtccttatcagctcctcccaacttccagttatttccttgggctcttctaaggaagtgtttatcattttcagggatgagtgacattccaagatgtggccattgacttctccaaggaagagtggggattcctgaaccctgctcagagagatttgtacacaactgtgatgctggagaattatcagaacctggtctggctgggtaagtgcttaaagcccttaattcagcaactggtcttgagtatttctttttttgtttttatactgggagtctttggtgagattcagaatttacatgagatgtggaaattggagtgagcagctttctttatcctatctgccagatgttctaatgtttttgtttttataatggcttgtgtttcgattacagtgttgatctgtcacaatacctgagtaaccagagcatagccaactctttctattcacaggactttccatttctaaatctgtgatttcactgttggagaaaaggaaactgccttggataatggcaaaagaagagataagaggcccattgccaggtgagtatgaagaaccaactagcgggggtaagccatgtatatgaaaggcataccaggtctagagggcaaagcacctttaagatgtgaaagatgctctcttccaatgttccatacgtatgtagaaattgaggctccttgagtttgagttcctaaaagggtactgatcacccaccatttatatctgcttttataaatgcctgtgggctcagaaattacaggtgtgtctttcctctttgtctatggtaagcttccttttaaattcaggatcctgtttctcatgactttttttttatttgactctttgatattgttttctttactgtaagatgacttatatagtggtctgattgtttgaatgggtgtattcattggtcatttattcattaacattaattccatttttaaaactagtcaactgttgagagtccccaagaccacccccaggttcaaggacttactaggagtcgtcacaggagtcatcatatcattgtattcatgcctgcaaagttagtgaatagtccagaagaacaccatcattctgatgccagctgcaaagtatgggggtccccaagaccaccctgaattctgacacgaattgcaaatccaaaggtccccaagatgaccctcaggtttgataattcactagaaggattcacagaactcactgaaagctgttacactcatggttagagtttattgccatgaaaggatacacattaaaaatcagccgaggaaaaagacatggggcagagtctcggaggacttccatttatgcccccacagtggagtcatggacagtgttaactcctcccaacaatgatgtgtggcagtatgcacagtgtgtggccaaccaaggaagcctatctgacccttgttatccagactcctcattagggcaccatcatgtagacatggctgactgctaatgtctcacctcaatctctagctcctctgaaggtcaccctaatatcatgtgacccaaagccccacataaatcacatagtttgattatctggtgtggtccaacgcccataggtaaatagagacacttttatcttgcaggatatttcaaggtgtcagagatgaccatctcccaggagccaaaggcaaagactagaactctctttggaaaaggttaaattatttactacacaatggctaagatttattttagcaaaagatataaaacaaaatcagcaaaggtaagctcataaggcaaagtctggaggaaatcaggaatgtgcttccgagattcctctcccaggggagtcacacaggaggtacttaattcctctagcagcaacttgtgtggtatgtgtgagataatagcagctagacaacattagacttagtgccaaggaatttacttagggaagccataaaggtaccctctgccgagtatatgctaaaaatccagaatctcagaaggaaagtaggtgttccgcataaaccacatcatctgcacaaatagcttaggcacagtaagccacttgtaccagttccgggaatggtagaaaccctcatgaaatccaagttccttagaggtcagtcaggggccaacgttgtaagcacacctttctaaggagaacagtctcaaagcctgctgtgttcttttctgagtttgtttaaaagtatagaaacttgcagtgagtttacatttgagtgaggggattaagacttgcttccacaaaccttgtgcaaagtagaaactaattaactagtagaaactaattaaaatggtttattttgatgtgtgggagttagtaaagttttagtttcaaaactgggtgatatttaaagttatagaaagtgaggaaatgaagtacatttgtgatatatttatttaaggaattgttggaattaaggtatgtcttgaactgtgagttacaaatatgtagctggatctcaatagtaattcagaattggagatgaatgtgttttttatatgttttgtggtgatggacccttaggaatggaagaaatgaattgcctatagatagcagagaaggactgattgattggtagcaagagaaacaggaaacatcctgtgttagaattccagggcctcactattcatgaagaaaaggtaaccaaagtaagaccaagacgttaggataagacaacgttgaaaggtagtttatatctgactaatttatggttcttgctaaagtggatatttctatggtgaaaaggatgtagaataatgagcttgaatcgtcacatttggtaataatcttttatttgagttcattttcaaaaccattaggccttcgtagtagaggccccctgtaaaaccagcccctcttgcacccttaatgaggttagccctctccactgtctacatacacagtataatctggaaaaaacagtgggattcccacatgtttagtgcatgaaaaacaggccagactcagtcattttccataattgaccggggttctgttctgttcttttacagcaagcacagccagcatctctgcccctctgccctttagctcctaaacagtaaaaacaactacaggttagaagggtattatgttcgtctttgtagcaagtcctattgcctttctttaatttttgatcctgttgatcagtcttcctgtaatgccattttggcccctgcaattccccatagtacatgttttcttaagctctaaatctgtttccttgctgccttcacttgaccctcttatttttcctgtttgcttagcgatctctttaatctcaaaatgtctatatcagtgagaattcataccctatctgcccctgattatatgattgattttattgtttctatattatgtcaaattgtttctgcagtaaaataattggagatgccttctgtctggacacattaattcctctggttaatgcatacatatacatacagaaactatcatttacctttttgtgttttgaaacttgtggtataacttagcacactgcatcttgtccttttcacttaatacattatcctgcagctcagaaaacagctgaagttcactctttttttagtagctaagtaatactacagatagagatataccatggttaatgatgagggacccctagtttgtttccaatataaagcctatttcaataagcattcttatcaatataaccttaaaaactggtatcttagtttcttgagtaggtgcctaaagtgggattgaaaagataaaagataggtatattacattagtttaatttgcttctgttcattgattttttttcccctttcagatgtgccaggtgcagagattaaggagttatctgcaaagagggctattaatgaagtattatcgcagtttgacacagtgataaaatgtacaagaaacgtatgtaaggaatgtggaaatctatactgccacaatatgcagcttactctccataagagaaatcatacacaaaagaaatgcaatcagtgtttagattgtgggaaatacttcactcgtcaatcaactctcattcagcatcaaagaatccacacgggagagagaccctataaatgtaacgaatgtattaaaaccttcaaccagagggcacaccttacctagcatgagagaattcacactggtgagaaaccttacaaatgtaaggaatgcaggaaaaccttcagccagatgactcatctcacacagcatcagactacacatacgagagaaaagttccatgaatgcagtgaatgtggaaaggccttcagccgtgtctcagctcttatagatcaccagcgaattcatagtggagaaaagccgtatgaatgtaaggagtgtggaagagccttcactcaaagtgcccagctcattagacatcagaaaactcattctggagaaaaaccctatgagtgtagtaagtgtaagaaatcttttgtgcacctgtcttccctgattgaacattggagaattcacactggagaaaaaccatatcaatgtaaggactgcaaaaagaccttttgtcgtgtgatgcagttcactctgcacaggagaattcatactggtgaaaaaccctatgaatgcaaggaatgtggaaagtccttcagcgcccattcttctcttgttactcataagagaacacacagtggagaaaaaccgtataaatgcaaggaatgtggaaaagccttcagtgcgcactcttcccttgttactcataagagaacacacagtggagagaaaccctatacatgccatgcctgtgggaaggcctttaatacttcctccacactttgtcaacataatagaattcatactggtgaaaaaccctttcagtgcagtcaatgcgggaagtcctttagctgcagctctcaccttactcgacactgtagaatgtgtaatggaaaatttagcaaataaccaaaactcaaaatgttaattctgattattctgtatcatcaccagtactttgtactttgagtctttttaaatatgctctgttagtttgtatggaatgatatttcattgcacttttaatttaacttaaaaatgccttcccttgactgttgatatgtattttttgtgaagtgtgtgttgaagccttgcagattattttttaaattagaggtttatcactaggtatatctcctaatgctatccctcccccctccccctaatgtaaatgacgagttaatggtgcagcacaccaacatggcacatgtatacatatgtaacaaacctgcacgttgtgcacatggtaccctaaaacttaaagtataattaaaaaaaaaaattagaggtttttcttcgggtgcatttatgagagttcaccagattttggaaatattttctattctgtaacctaccttttcatttacataacagtgataaaagctttaagtttgatcacatccaattaatcacattttttaatagttatgcttttatttgtttttcagacagggtcttactctgtcacccaggctggagtgcagtggcacaatcatggctcactgcagtctctgcctcccaggctcaagtgatcctcccacctcagcctctcaagtagctgggactacaggcatgtgccaccacacctaatttctatattttttgtagagactaggtttcaccatgttgtccaggcttgtcttgacctcctgagctcaagcagtccatctgcctcagcctcccaaagtgctgggactacagacatgagccattgtgcctgacctagttctgctttttatgttctaagaagtattatttattctatgctgagcttacatagaatttcttccatgttttctatagctatagtgtatttttaccttttactgttagatctatttcatgtttttattatggataatggaggaggtaaaggttgaattatattttcccccatattattgacccatagtgacaccagttttgggagatgtctttcattttcgcccttacgttgttattggcaccttttgcaaaaatcaattatttatcatgagtatacttctgaaatgatctgtttcatcaatctatttgtcttctcagtagttccacattgtcttaattatagctttagaggaagtcttgaaatttggtagtaagtcttccagttttgttattttaacaaatttctctaggctgggcatggtggctcatgcctataatcccagcactttaggagccccagacaggaggatcacttaagcgcagaagatcaagaccagcctgggaaatatagcaagaccttatctctacaaaaaaatttagaaattagctgggcatggtggcacccatctgtagtcctaactgctcaggaggctgaggtgggaggattgcttgagtccaggagttcaaggctgcagtgagttgtgatcacaccattgcagtccagccaggttgacagaatgagaccctgtctcttaaaaaaaaaaaaaaaaatcctggtgatgcttttctggattaaaaaataaaataaaataaaaattggcctcactactctagcttatttgcattttctaataaatgttcagagtcaccttgtcagttcctaccaaaaagcctgtcggtattataattgagattgcatgaagtctgtagacaaacttgaagagaattgacacttaacagcagtgacttccagtctgtaaccttagcataagttctatttgtctcctttaatttttctcagaaatacctgtagttttctgtatagagatcttgaatgtattttcttaagtttattaatagacattttcacaatatgtaaattcgtttgtcttttacttttccagttgtttgctacttgtacatcaaaatagcattttgtacatttatcttgcatcttgtcttgaacatttcacttattcttggagttgtcatacagatttcttaaattttttttttttcttttttttttttttgagacggagtcttgctctgtcacccaggatggagtgcagtggcgcgatctcggctcactgcaagctccgcctcccgggttcacaccattctcctgcctc[212 bp omitted]cgtgcaaatagacagtgtattcatttctggtctgtgctgttcttttttttctcatcttattgcaattgctgtgtgacctccaggacagtgttgaatgaaagtgataaatgtaggcacccttgttttgctttcagtcttaggaggaaagacttagtggggaggaagtggcaactctgagtcaggatgtagacttcttagcatatgcatttgcacatcttgctcaaatcccagatttccctataccctctatgctccctttaaaacaatgctttctttccacagtatctttcccccaagtcaataatgggtcaaatttcagcagtcccaaactggggaagttctgggactgctgtggtaagaaatggattcagacaccaaaggagctgtaggacctggctaacatgtacaagcaagaaccagaagagtatacctgggaggagatcctgagattactgcatcattaggtagaatacaaagttgaataggggagagttttttgctatggggtcactgtatgacaggattaacacactggcaagggaaaaagatgcttctaatggatgctgggacagtttttgaagcttggaaaaagcattggttctcattaaataaaatgaagatagcagaattgccatgacaaatgaggatgggatcaaaagaagtggatatacaagggagaacaagcgtcatggagatggccaatagtagctgtcccctaggcgagggctggctgcaagaggtgctgttaaggaactgggctctctagttgcaatgggaatgataggatctcagaataatggcagccaggtgatagctcttagcatcaaacgcaaggagggccataattaccatatgggtagaaggcttagaatagaatctggggagattgatcttcagaaatctatggttctggctcatagcacatgagtttgccaatggcaagtcatctgcttccaataagagtaaacttattgagacaaggggttgctccgttgcccaggctggagtacatggcatgatcacagctcaactgcaaccttgaactcctgggctcaaataatcctctcacctcagcctcccaagtagttgggactacaggcacatgccaccacacctggctaacttttttgtttctttgtagagatagggtctccctttgttgcccaggctggtctagaattcatgatatcaagtgatcctcctgcctcagcctctgagtgttggaattacaggcaggagtcatagtgcctggcccaaacttaactaaaaaacagagaaggcaaggtgcattggctcacacctgtaatcccaggactttgtgaggccaaagtgggagaattgcttgagtccaggagtttgagaccatcctgggcaacataagaaaaccctgtatctacaaaataattttttaaaaattagcctagcgtggtggcacatgcctgtggtcccagctgttcaggaagctgaggtaggaggactgcttgaatgggaggttgaggcttcagtgagccatggctgtgccactgcactccagtttgagatgccatctcaaaaaacaaaacaaaaaaaccagacagtaaatataggtgttgtggccatatagtctctgtggcaactactcagctctgctgtagtgaaaccaaagcagtcgtagaccataaatgcaatgtgtcactcagactttataaagcaggtagcgggctggatttggtttttataccctgcactaggcaaaatgggatattatgtaaagataaaggtataattcataaatagagggttagtagtatgtccctgtaagtcaaacaatataaattaaaaagcgtaaatgtctggaaactcaaggtgttggcaacatttttttaggaaattctgatccagcataccaaattatatgaaaacatggagatttttactattgcaatctagtggcttaatggacttatttagaaacttgtatccaaaaatgcagaatacatattttttcaatgttcatggtatacagaaatcaatcttgtatttaaccacacacacacacacacacacagtcaaactgggtggcacagcggctcatgcctgtaatcccagcacttataggaagtgctgggaggccgaggcgggtggatcacaaaggtcaggaaatccagaccatcctggccaacatggtgaaacctcatctctactaaaaacacaaaaattagctgggcatggtagcgtgcacctgtagtcccagctactggggagactggggcaggagaatcgcttgaacccgggaggcagaggttgtgccactgcactgcagcctggtgacagagcgagactccatctccaaaaaaagagtaaaattcaaaaagtagataacttcaggccacatttaccaaccataataaaattaaattagatattatatcacttaggatgcttttggctgcgaatttacaaaatatccaactaaaactaactgagcaatcaagttttatttttctcagataacaaggcatcaaaaaggcagttccagaattggcctagtagctgagtcttctcaggctctgggtcagcttctctgaggtccacttttttctcttcttggttccaagacagctgcagcagcttcaggcatcatgttcttatataaaaatgtttaaaagcaggaagtgagagaggaggaagtcttcatgataaacctgtctcttctgaatgaggaaaatctttcccagaagccccggcagattccactgagcaacactgggagatactggccatactgtgctgcacaggagactggaaaattagcatctgatattctcagagtccaaggcaagacacagatgctgccaataacaaggggaattgggtatggctgctgggatgacaaccaatggttgtctgtgccagtcacataaaacaatgtaacaatgtggaaattaagaaatattctcctaaatttagattatttctggatcagaaagaaacaaaaactgagattattgtaagatggtctctttatttcatcattttctgttactttcttctttcactgcctggatgtttggtagacttgaatagcatgtttagtgcatatgagtttatctttcagattttcatgtatatgcatgcattcaaaggctataaaaattcctccagtgtagctttggctttccccttaccctcacatctctttggccacatttcacatctcttggcatgttaaactctcaattcattcttttcattaccatttatggtaattgcatgatttctttgttaagcaaatgataatctggctgtttttttaacttgtaagaaaactataacttttgctcttgataaaattactacactgtggttagaaaatgtggttctggaatgtgttagaaataaaatttctcccaacctttcccagcatttttgacaattatgatctgaacaatttacatccataaaattttctttgatatgaattttcagacttaggataaaggcttacctctgaatgaaggcattgtcactggcattacattcttcaagtctttctccaagagggagaagtaagtcacagtcacaattagcctaggctaatgggctttccccattacttccattcatatggttgcttgccaacataaattctctgatgattagtaaggggtaactgctgatggaaggcttttctacatttattatattcacatgtgtttctctattatgcattctctgaggttgaacggtagttgaatcatgactcaaggtcttctcacattccttatattcatagggctttttctcagtgtgaataacctgatgatgaatcaattgtgagcaatgactaaaagccttcccacattccttacattcatatggcttttcacctgtatgaattctgtaatgtacagtaagatgtgagacccgtttgaaggccctaccacataccttacattggtagggtttctctccagtgtgaattctctgatgttgcttgagttgtgagctcactctaaaggcctttccacatactttgcactcatagggtttctcaccggtatgaattctctgatgtcgtataagagttgagccttgattaaaagccttcccacattccttacattcatagagtttcctgccagtatgaacagtctgatgttgaatcaactgagaacgatgactaaaggttttcccacattccttgcatgcatagggtttttcaccagtatgaattctataatgtactttaagatgtgagatccgattgaaggccttgccacattccttacactgatagggtttctcgcctgtgtgagttcgctgatgttcaatcaactgtgagcttcgactaaaggccttctcacaatctttacattcatacggtttctcaccagtatgaactctctgatgttgtataaaatttgaaccagaattgaaggcctttccacattccttacattcatatggtttcttaccagaatgaatattctcatgttgaattagtcgtgagccatatttaaaggccttcccacattccttacatttatagggtttctcattagtataaattccttgatgattaataaggagttccttttgccagaagtcttttctacatttattatacccaaaaggtttttctctagtatgaattttctgataaaaagtaagggatgcatgctggtcaaaagtgggcatttcttcatgtctgatgatcatctgatggaaatgtctgtctggatttccctgttgtctgtcaaactggtttctgcattcccaatcatcttggaaacttgaacactcaagaccataacttgtaaggctttccattatctcccattggggtgattcgacttcataaacatgctgctttggaaataattccttggtatcatatctggactccaatactaagaatgaaaaaaagcgaatatgtttggcttctttttttttccagataaaggaactaaaataagaactggagggtttagactcaatgcctattaactcttgaatgtagctaagcaattataaaatggacaagtagaacagtgaaaggaaaataacatacatgagatgagggaggcaataagagaggttataaaagtgattctaaaatgttagtgtggggctgggcatggtggctcatgcctgtaatcccagtgctttgggaagccaagaagggagaatcacttgaggccaggagtttgagaccagcttcagcaacacagcaagaccccatgtctacaaaataatttttaaaaattagccagctgcagtggcacatgcctgtagtcccagctgagaaaagaagactgcttaagcccaggagttagaggctgtagagagctatgatcacgccaatgcactccaacttgggtgacagagggagactttaaaaaaaaaaaaaaaagagttggtgtgggtcagaatcactattgaacaatattttttaagacagtaaatgtttctgtgagactctagaaaagacaaatatagagtgacagaaaccaaagcaaatcattggtttgacggactgtgcaggagggagcacaagggaactttttgggttgatggaaatgttcgctatcttgattgaggtgatggttatgtgggtgtataaatttgtcaacactcattaatagcacattttaaaaatgcattttattgaccataaattatgcccccaaaagagtgaattttaaaaagatgatggggatttcaagatgaaaagagttccggagatggacggtgatgatggttgtacaacagtgtgaatgtacttaacactactgaactgtacacttgaaaatggtgagcacggtaaatcttgtattttaccacagttttaaaaaataaaaataaaagtggtgttggaagtgtgtggttggatctgcaacctgcctcagtgcctggaggacatgcaggagaatgaaccagaggaatatgctggtacagtggcagctattctcatgtgtccgctagaagttagaatgacatggctgctgtcttcctctgtgaagctttttatatctgaagtttagctgaacaccatggtgttttttatatctgaagtttagttgaacgccatggctgaagcccattatcaactgaatgacatttcttaaatttcttaaatgtcatgcatttacctgaaccttttcatttcttaaaggtgaccttggaaaaagaagggcttttttccttgtttagaggattaggccagttgattgagggtgggtccttctagagcaacatactttgctgattattcaaactgcatgaaaaagctgaatgctataatggactgtgattctacctggtacattatttcagctacagtggcaggttttactgtacttatagcaaccaaccccagttgacttaaagagactcagatatagcttgactacaggtgggcaccaccatgctcagctaatttttgtgcttttttgtaaagatggggtttcgccat[138 bp omitted]tgctgaatcatacatcatagattcaaggtgatgtgctaacaaggatatcatttttaaatgttgccatgaagttcaaatgcaccttttcatactttaaattgatatatgtatataacccttaaacgtttatgttcatgataattctgttgagacttctggctaaggatgttgctatactggtatataaaatgtgcacaattaaactccagtgtgatactactcatttcagtatatatgagtgctgtattttgtgcagtagctttatcttaatatggctctttgtgaatgcactttatagcatttattgagggtgaaagagcaggagggaattctatgttacgtatttctataaaaacattggtcatttattcaacagaaccagtattcctaacatttgtctgggttttagatatgttgttctgcagatctattcactgtagtgatcccaacattattgaaaattaccaagcttttactgctctcaccagtgaaaaactgtaccttcttaaattctgtcagcatgtcacatttattgtaatcaacagtaactggatgtttctgaggtgttttgattggactcaaaagtattacaatcagtttggagacaaaaacacaatctgcattttagtttaagtatgacactgatgacttaaaaaaaaactatatacaaacgttctatataaagtttgcctccaaagtatttctctttctctttcttttttgcaggggagatggggtctcattctgttgcccaggctggagtgcagaggcacaatcatattatactacaacctcaaactcctaggctcaggtgattctcctctgtcagccttctgagtagctgggactacaggcatgagttattacgcctggctgcagagggattttaatatgtaaaagtattaacacagtgtattaactttgtgcccacgcaaatctcttttctatcacatccttatgttcttcgacagattgacttttatgcttctccttttagaaacataaaattgttttattcttagttttaaaaaacatttgaatgtgtacccttgcttatgcgaagatttatgacctactagtcatagctaaatagtcaacattgtaagagctgatactttttggttcatgtgaggtttggcattcttgcatttatgtacacggatgtcaattgtgtggacttcttctgtatttatgttaactagcttttactgaattgttgaaactaaaaaagttaaaaacgtgcttataaaaaaaggggggggggattatgtccaaagaacccaggagccagtttgaaagggtgtcactgggcaagtctggaaaactatgaacgttgtgataaataatgataatgggtaataatctgttacaggataaaacaagatttattttattctgacctggaaatgagaaaaaatatgccacctactattaatccatatgatataaatgaagaaacaaatggtgaaagggagaaagctcttctttacaggagtatgtgatctaataaataagaataaagtttttttaaaaatcactattttgtaactattaatcatatctgatccaagagaaaactatcaatgacttctgaaactagcaggtgaataatttgtgagaagcacaatatttatatcctctccaggtggaccataaaatcatggcttgcctctatttctacagtgctttccctctgcccacagtgcagaacccaaacttcataacgtggttgcctttcctagcgtatctttttttttctttttgagacagagtctctctctgttgccccagctggagcgcagtggttcgatctcggatcactgcaatctccgcctcccgtgttcaagcgattctcctgcttcagcctcccaagtagctgggattataggcacgtgccaccacacccggctaatttttgtgattttagtcgggacgaggtttcaccatgttggccagactggtcaagtgatttggccgcctcagcctcccaaagtgctgggattataagcatgagccaccatgcccggcccctagtgtatctctgtgttcctccctttgctcactgacctcagccacaagggccatccattatctcagaggtaccaagggctccctgctcaggtccttcacactcattggctacaactggtattccccagctacatcacaccttccatgtctcagctgaaatgccttatccttgaagaggccattggccctaccatgcaccctgactgaacctgttctttttctttcacatattagctcatgtccagtgtgtatgatttcatgtctattttcccactgcagtgtaagttccatgaaagcaaggataatgtccacctgcctcatcaatgtatactgtggcatattccatggtgcataataaaagcttaataagtacttgttaactgactccagaattcaaacaaaccgatacaaattcctttagaaaaatggtcaaaggacaagatcatgtcctttgcagggacatggatggagctggaagccattatcctaagcaaactaacacaggaacggaaaaccaaatactgcatgttctcacttataagtgggagctaaatgaggacacatggacacacagagcgggacaacacacatgggcctttcagagaatggaaggttgggcggagggagagaatcaggaacagtaactaatgagtactaggcttaatacctgggtgatgaaataatctgtaaacaaacccccatgacacaagtttacctatttaacaaacctgcacttatactcctgaagttaaaaaaaattttaaatattaaaattaaaattaataaaaaaagaaaaatggtcaaaagatacagacatctttccaaagacaaaatactttccttaggaaccaccatatttgtactcagtctagccctataatccaggttgaatttttaaagtgtttcaggaggaaggagcagccacctttgtcaaatgctgctgacgagctgaggaaaacaacacgtaagacataagctttgaaggtagcaacctgcagggaagatcttctaagacaaagggccacttccagcggacctgatacctgcagtggctgctcccttcccaatgatacctcactcacctggacacaggcctccagacaccactctctccaccatccagggctctttgccttgctctaggaaggagatcacatcaggtttggaaacggcaagacctggagatgagaagaaacatgccacctggttatggtgtgggggccccagaattcagatccaggacctggtcatcaagcaggagaggcagttgcaggaagtgccagaggaagatgggacagttgcctgggggtagggggatgcagcttcagccgacagcgccgccctttaacccctcaaaaatgaccaaccaatcataagactgaaaagcacccaaaaactgaccaggaaggaacatgcccaaggataacctccaaactaacagacgagatcaccttacccagtgagaccaggttgctgtaggtctccaacatcacgtctctgtacaaatccctctgagcaggtgccaaccactgccattcttcttgggagaagactatggccacatccctgaacaattctgacccctggaatgacaggcatgtatgatatatatgtatttcaatggttcacagtgggatgaaaggagatggggcaggtctttgcgggagggggggttgttttgttgaacaagaagggtgggactgaatgtgaaaggtgacagaagaaatggggatgagtaaaacagaatgatcaaattgttctcaaacattccttttaactgcaaatcaatgctctgtgtacaggtctgggatgaaaattaaaatcaagctaaatggagttttccttattgttaagaaacagtgtaataaagcacactgcccactctatacttggcatacaataaattctcaaggtgagacctatcacttctatcttttggaataacaataacaacaaaaaatatttctgatggattttccccaaatattttattttttaaaattatggaaacatgttttctatcttagatacaggattttcatgtaagtcaagaatttcttggagatgaaagttcatcattatgttggaacataacacaagcatttttcttcatgggaaaaaccatggagataacttttattgagtgcacaattttctatcaagtgaaacaactgactcaaacatcctcttattttggatcccgaggttggatcagatctctaaggcttttccaagccctgaccactcacccacctagatgatcatctcacttgctacatcgctcaccatcctcagctctgtacttttcttcctcttaagctaaagaaactaatggaggatgtcccagattcaaatgctctgtccaacgtcaaactagactttaattctggcatcaaatttttgatggattcccagccaaacctcaattacatatccaatcattaatcattcccaaagcaggacactgtaccatgcgctgaaactgaaaccaaccaacaccacctcccctgcttttctatatgtgattgctcctaagcattcattccatctcttcaaacttcagttcttacaaaggatgctctcatttcatacagggaaatgagtttctcctcctagcagacgaaaaccatcaggagatgcagaatgctatagagaataaatctgtgggcatttgtcagaggggagaggacaatgggagaggagactcctgcctggtccttttattccctaaaatgggaaagtctgagaaccaaatttctggatggaacccaggtggaaagtttcaagataaggaaagcaaatatttatgggatttaaaaactcacaagggacatgacttttagaatttcaagggctgataggtcctccttctggttcctctcttggggaagggcagagtcctgcgacggtagagctgggggaggaaagagcaaacatgagaggctaggcttgcctcacagttcctagaatgccaagttacaagtccccacctgcttgccctctgcccaccaagaaaatgagaaggagggggaggcaaagggatcctcacccaaccccaggaaaccagctttagctgctgcaaggcaaaggggaaccagtggtcctttccctcccatttcccctaaacatccagtggttctgttttgctgcaaatgcaagtctaagacagggatgctgagggctgttctagtgactgagacccacatgttacctcaaggacaaggagggcttccctcaagccagggagcatagaaggcctgcatcatttgcatagccccagcctagaataaagcctttccaggactaggccatttaactctctcctgcagcaaatataacacctttgaaagtctacctggctcttttcccaaccgccaaatatacaaaaagctctacagcccaaactgaggctttgtgcatgccacttcatggagcatgccttgcatcaacaaatgggatagagttggaaggaacagtaagagacaaattacacacagcacgcccagtgctccattatcagcacataaatgtgtccttccatagagacacagcagtgcacaaagctgcatgtccaataatatttgctaaataggagaactgaaaattagtacgtaagtaggcaagtccacaagtagccaagaggttgaatcatttttggcacagccatataatgggatgccaagtgactatcaaaaatgactatcaaaaactgacaagcaaagatattaactactgaatcctttgagaacattcagcaaaaagaagtcaaactcactaacacacaggctaaaaacaaaacaaaacaaaaaaattggaagaaaaaacacccaagtattcgcagtgttgtcatttaaccagttcttgagctcactgttaaacaagaagtactctgtaaaggagtatataaggtgcctactgcattacaaacatttggttctaagtaacgtgtaagtgaaataattatgaatgttgcttaatatgatgtaataggcagcttttccttattatgaccacttttataagcattatttgtattaactgcacgatatcctatttacaaaggatggcctgtgatccactcaagtgtttccccattgctggacatagaatttgaacatataaaatgttcccaagtataagtttttctaaactagcggttctaagtcttctggggtcttgtaactctctgagaacctcatgaaacaagatttcctctcagattaaaaaaaaaaaaaggcacgcataacagtgaatgcaaaacatccgcaatttcagggggtcggagacccctgcgcacccacctaaggggtccatgcacctgggctatgaggctggaagcagaaagggggcgccagaaagcgcacgccgcgagggccggcgggaaatgtagtctcacgccggtaaagccacagagcgacgatgaggcgagacgtctgcgttcttctcaggcctgagacccaaccggcccgggcaccagctcctgctggaccccagagcgcctggaaagctccggaacctctcacctgccgcctcctcgggtccaagtgccaccgcggccgcgcccccggcagcccagggcgcgcttccaccacggtaccggtggattcgccgtgcgcagccggaagatggcgcagacgcacaaagcacaccgatgctgcgccatgatagggccggcgccgcagtgtcttccgggaaacatagtctttaggcgtaaaggcagcagcccggccttgaagccggatctcgcgatgtttcagggtgagccggacgcaggcgtgcctgcgcagtgcgcggaggagtgctgttcgtgtgttcgagtccctgggttgcttcctggggtctgtggtgctgggtgtgctatctgcgtgtgattctctagcgagagattgtgggcgagtgaccgagtgggcaaggggccgtcactgtgtgtgcgtgattttgacagtgtgtggtggtagcttctgactccgcgtgggtcgttgaatgtatgactgggaccgtttagcggtggatacacaactgtgtgcggctgtggaagattgcctcatccgttacgttcccatttccgtggaacaacagttttaccagaaggtttcgaaggaaccttaaagtttggaagcgtaagagtttatctggtaactaattttaaacattacatctatggtgagttaaatgtgggttatgaaggagaacgcaaaataaaaacgttataaagatgtaaaggagttttatggggcggcatctcttgggcaaatatcagaccgccgtaggtagttgttaattctctcttgtttttaggcggctttggtgtcatcaaatgtgagaagccctggactttacacatcccgagccagtgtgatccagtatgattgggagtccgagtgccagatgccggtcaggacctgttatgctgggtctcagaatgcggaaactctccctgtccgaggtggaacagtttgtccttgagtgaggactggagtcctgagtgactcttttgatttgatcctgtttccctcaaacctggtgagctctatggtgtaataaatggttaagagtgtgaacccttaaccatctctaagactggagccagaatgcctgaactccagtcttagagatgtgcctcggtctccacatttgaaagtgaggatgattgtggcatctaattcattgagttgttggggaggagtaactgatatgtaaaataatgctactgctgctggataaggatgctaatatgactgaagctaatgctttctttctgcaaagatgctttttccaaaacacaccatattgcctctttacacattcttcaggagagggtagaggctgcattttccttgtaggtgcggtgatgtggtggaaagcacacttttagaattagacagatgtggattcaaatagcatttcagccatttattagtttcttcgtgcctatctcggttttgttttgtttttttttttttgtccataaaaggaagaatgtaatgctgggcttgcagctttgtcctgagggtcaaataaaatgatttaataatataagcaaagctcagaggttggttattgctgattactgatattaaaagacaacttcagcaaggatggttgaatttcacacttgtgagcggacagttgaggagacagttgtagatttatcctacttgaccttatttgtggttcaagacagtgttgcgagttcaagaggagagggtagatgcaaaaagtcatcatctttcctatgttctctgatcttgggaaggggcgagtggctctagtttccctttaacatcccactgtgttgagtgtgtctatatgtacatgcgtcagtatttgcttatggaggaaaggaaggaaaaagaccaaacaggtacaaagccagccatctctcaggctaactttcttctataccatttttactttctcacattcattaatctgccaaagagaaatttagaggatgatgaaatggccacttctgactctgaaccaagcctctgaagtcatacaccattatactcttggtcacaaaatcagctgtgagtctaagtaggtggaggctacacaagagtataagtactaggaggcagggatcattcagggtcgtcttagagggtggcttccagtttcttccttttaagagtatgagaatgctctgagctagcctctccattccatggaatccataggtcttttgtcagccacttcccagtacacattcctgtgccaaagcacatgcagagtttgtagggtccagccccacagggtcggttggtttctccccgtgtgcggagacgagagattgtagaaataaagacgcaagacagagataaaagaaaagacagctgggcccaggggaccactaccaccaagacgcggagactggtagtggccccgaatgccaggctgcgctgatatttattggatacaagacaaaggggcaggataaggagtgtgagccatctccaatgataggtaaggccacatgggtcacatgtccactggacagggggccctttcctgcctggcagccgaggcagagagagagaggagaaagagagagagagcttacaccattatttctacttattagagacttagtactttcactggtttgctactgctaactaaacggcagagccaggtgtacaggatggaacatgaaggtggactaggagcgtgaccactgaagcacagcatcacagggagacggttaggcctccggataactgcaggtgggcctgaggccctccacaagtggtggaggagtagagtcttctctaaactcccccggggaaagggagactccctttcccggtccgctacgtagcaggtgtttttccttgacactaacactactgctagaccacggtccgcttggcaacgggcatcttcccagatgctggcatcaccgctagaccaaggagccctctggtggccctgtctgggcataacagaaggctcgcactcttgtcttctggtcacttctcactatgtctcctcagctcctatctctatatggcctggcttttcccaggttatgattatagagtgaggattattataatttggaataaagagtaattgctaccaactaatgattaatgatattcatatataatcatatctaagatctatatctggtataactattcttgttttatattttattatactggaacagctcgtgtcctcggtctcttgccttggcacctgggtggcttgccgcccacagagttactccagcagctccctctcctgttatccccagccatatccgtgcttctgccagattccttctgtttcaggatcacccattatcacttgaatgagatcaactgtggggaggtgggccatattctgttgtgcatagtaatccaagcaaggaatcacacaacaaagtgggttctaacccaatcttagctacttactccctgagtgaccttgggcacctcccccaatttttctgacctaaaatctgtgcattataataataataaatttccacggaggaagtataaccttttcaacaaacagtgctggagcaactggacatccatagccaaaaaagaaaaaggataaaaggcttttctgcagtactaatccaggagaaaaataaatgtattgcatcttccttgtgacaactgaggacaaaatacatgtggcctctctctgaggacttttttttttaagagacaaggtctcactctgtcacccaagctggtgtgcagtggtgttcctggactgaactgaaggtcaggctgcttattctcgcagccctataacaagatgctgatgaactgtgaaagaagagagttttatttctgtaaccgggtacagggagagggccagaaaaatattgccagaccaactcaaaattacaaagttttccagtgcttatctaccttctaagctatatgtctacatgttagtgtgcattcatctaaagacacaagtgattaatttcttctaatctataactaaggtctgagttatagaccttggggacattcctctggagcctcagtgattttacttactctagatgggtccaagtgccaaaggtaattaccttatcttgtctcctactaagttatggaggtctggagagttcctttagacccccaataaaacttgtttaatcctaaatggatcctggtatgaggagtgtgaccattccttcattattttgtcatgcttcaaatcatcagcctttgtgttagggcgctggctctctcagcctttaatatttaacctaaccatttagtcaatgctagaacagttcttatggaggcctgcctgttcagtttttgtgagatctggcttgccacagtggcacaaacggcttactgcagcctcaacttcctgggcttaagcgatcctcctacctcagcctcccaagtagctgagaacacaggtgcgtaccaccacaccagctaatttttcttttctttttttttttctgtagagatgggagcctcactgtattgcccaggctggtcttgaactccggagctcaagtgatcgtcttgcttcagccttgcaaaatgatggtgaagctgcatcattgtctggggtaaatacctgaggttcgttgtctcacgccaagggaatcaaggacgtggacacacaagaagtgagtttaagagcggaggtttaataggcgaaagagaaaagagaatagctctagctcctgcagagagaaaagggctcccaagtaggacttccagtccgtggcgaagggcacggggtttatagactggcttcaggaggtggtgtctgatttacgtaggccccaaagattggttggaccaggtgtgccaatcagaagctggctgccccaccctaatcttttattatgcagatggagtccctgtctgaccgggccatgttgtatgttccttgctgtacacgtggttgacaaagaaaagggaagatggagctgcgatgttggacatgcctggcccccaggtagctttttcctattggcacagctgctggcattcacccgtgcaaacttccagcttgcttatctatgtctgcagcttgatttttcaggctgctgtttgttagaaaagaaatgacttgggggctgcttttcattaaaaggaaaaccttaccggggatttccttaccctcactatctgcctaaataatttctttttaactcctatgtcacttgggattacaggcatgagccgctgtgcctgctagagggttttttatctttattcctcaagattttgcatttagataattatgttaaacttgggtgtgctaggtagacatacgtctgctgattacctgtttaggaagaatgtggattcgtacgtagggaaaaggagtcaggctggtgggaccaggggaaagcaaagagataaagcaaataagctatagatctgcattttcttcatggtccaggatatataaacaaaaaaaggaagcagataagctataggcttgcttttctttatgacccaggacatacagccctgccgagcaaataatgaacgtaactcacaaacttcctgcttatcatcaaacgcacgcatccacttatcatcaaacacctcgggtgacagaagaatgcaggtcagctccctgctgccttggcattatcaatcagcccaggaaccatcctataaaatctccagcaagcctttgtttccttgcagtcagctcctcttccactgattctgcctgttgctccctgataacatactttgatactgtctttaataaatctgcctttcttcacccacagctgtcttggtaagttcttttacctctgtgccaccagcccaaacagttgctgctcacctgaaacaaagaataaatgtggtttttaagcaaatcaaagtttacttagtgactcttaccaagctttgtagaaggttgtgccaaaaggagaagcttaagagataacggctaaaaataaaaaatgttaccaccgcccaaggggttcttcctgcccactgcataaagaaagaccatggcattgtagtagagaaagaggttaatagacatgaggctggccacgccacatgggaaatggagttcgtactcaaatcatctaatccaaagctcttatcttagaggtttttcaaagtcactttgggggaaggggtgggagtggccagataacaggtgcttgctgctgattcgttgggctggagatgaaatcatagggggtcaaagctctccttgtgtggggtgaattgcttctgggtggtgccacaggaactgggttggttagtccaagtggaaccatcaggtccaggtggagccatgggtgtcagacatgaaaaaacctgaaaagatatctcaaaaggccaatctgaggttctacagtagtgatgtcatttgtagtagtaattgggaaagttgcatatcctataacctttggaataatggctgacagttgaataatgctgccaccttagcaggacccagactcctctcctcccagactgatggcctcccattagctttacaaaaacaattgagttttgggcaaagcctgttatttaaactatagcgtaaatgtcttccaaagttagctcagccctatagcccaggaataattaagggaaaggcaagataggtgggttagctcagtttactataataatttttctcactgatacagtttttgcaaaggtggtttcataaagatgcctactctcttcacacatttgtgaaatgtcgaaaagactgcaaaaacctggacgtttactgatgccttattttaaacaaggcttgtctggtttgaaaaagtgaggggaagctatcaatcataattttgttaaatacagtgagttctaagtttctcctcaaagaatctgtgtcagtatgttcagttctttgttttccattttaaagtttaacttcctcattctcttcatctccttgcccctagtttcagtaaacaacctccctgccagttctgatcagtagttcacatctgttctcctggtcacttgctccatcctgagacccctggtcacccgctctaacctaagtcacctttagtcacctattccgtaaccgtctttcctgccacaactgctcaccccaccactgtagctcttaacccctgctgtctttaaaatagccaatcggaattagcttagactgtgcagtccaaccctagccaataggggaacgatgcaacagtaggggctacctgtgtcagggataagaaccccttcccctcccttgttcaggtgtgctctcaccattgttccatccacaagatgcacccttctgtagaagtaaaattgccttgctgagaaaatttctgttcgaatgctatttcttttgtggcaccgaaaatttatttctaacaatttcaacactcaaacacaacccaactacaatttttgtggattatgttccttttactttttaggaacagttttccaatgttgcagtcataatgcaattttatcagctttgttcctcctttaagaaaccttaatacaagaagtatttttacatgttgcttcattgccatgcaattattcgtttaaaaagttgtatagttttcaatcagatagatgtgaaagg[155 bp omitted]attaagtgggtgtggtggtgtgcacctgtaataccagctactctactcgggaggctgaggcaggagaatagcttgaacccgggaggcgga[131 bp omitted]tgtcaggcaaggctgcctctcatttgattcctaaatacaatagctataaagattaaaagctacatacctccctcacaatttgcccacaaggaaattccttttggacaaaggacagaaagaattcaaagtcatccctctgaggctcacctgagagaaatgcatatctgattgcttccttggacctagtgtttatgtaaaaatgcaaattcacagagccagactaaattgtgtattcagtggaaagctaatcaataactcaaaagaatgcaaccttttgtcccacatctatttatgacctggaagcctccacctcagatttttccaccttacctgactgaaccactgtacatcttacacatagtgattgatgtctcatatctccctaagatgtataaaagcaagctgtaccccaaccaccttgggcacatgtcatcagaacgtcctgagactgtcagtgcttccctaaccatgggaaaataaactttccaaatcgattgagacctgtctccaataccttttggtttacaacatactgttatttatttgaccattcttctacttgtagctgtggagtcctgataagtaagcaacaatgaggaaggggccccagtggggaagtacaatgaacagttgtcctgagaaatggctaatcaaacaacagctctctccaggatgaccctataaaacttccttccagctcctgcctctttgcagacagctccttctctcctgtgctgccagttgcaaccttgcaatgtattttcatacgttctctaataaatctgcctttctttaggactgtcctggtaaatatgagactgttttctttaccgcctttgatacaagccctatctagttgctacccatgacagtaggtatattgtttatgttcaacattttattataaacaatgtttcagctgggctcggtggctcatgcctgtaatcccagcactttgggaggc[135 bp omitted]gaggcaggagaatggcatgaacctgggaggtggagcttgcagtgagctgagattgcgccactgcactccagcctgggtgacagagcaagactccgtctcaaaaaaaagtttcagttagtattttttgctgatatcatagttgcgtttgtttaatttcctcaaataaaattcccagcttatatgatgctctttgtcactggcaactttggtcagacaattaaatgaagcaattgaagggcacaacaggattttggaagggatggtacaggattgggagataaactagagataggagtttataaaatattttcaaagacagattgaagaataggaataagagtatgatattgtgaaatatatatttgatcttcctagcatagaacttctaaaatccttagaaactacaaagtaacagtaaaaactcattttgtatgctaatgagttgacagctggcaacccctatagagtttcaggatggggactggttatggaaagaccaagacatgactagaaggttgggacattcaaccccacccccaaccctaaggaggggacgggattttaatcaaccatgcctatgtaatgaagcctctgtaaaactcccaaaagacagggtttagagagcttccacccagctgaacatgtggaggttactggaaggtgcaacacccttttttctgtactttgccctacgcatctcttcatctatatcatttgtaatatcctttataataaactagtaaacataagtgtttcctgagttccgtgagccactctagcaaaatatcgaaccgcaaagagggggtggtgaaaatcccaatttgaaggtggtggagtcagatgttccagaggctagactttagtgggaagtgggaagggggaggcaggcttggggactgagccctcagcgaatggtgtctgacccatctccaagtagacggcgtcggaattaaactggaggacacccagctggtgcccgctgcagaactcactgaactcattgcttgcttgagatgtgtgggaaactcccctatatttggtcagaaaagtcttctgttatgattagttgtcgttgagataatagaaaaaaatgcaccttgcgttttttccactgattcagagggcataactgaaagaatgaagaactgaaagaatgatcttaatactctgcttcgcttttcttgataatacgcattacttcccaatatgcatcagtgtcctttattattaattttttcctattgaattcctcccgcattagaatgctgctccatgaggtggggattttgtctgcttgttcactgctgtgtgcccagggcccacgacagtgcccgatacagcaggcgctcaataagtggcgaatgaaagacagggcaaggcggagagagaagaaacagaaagggaaagagaaagcccgggccgccagagcgcttaatcacacgtacatcctaccgggcccctctccagctggctcaggctccacactggtcctccagctcccttttctcagcgatggactcacagccccacccggagcgctggagcgcggacgcggtcactgcgcgtgcgcctcaccgcgctggcaccccggcctggcagcctttggggacctgaaccagctgcgcctgcgcaggtggaacgggtggaacgggtgggggagcggacagtcgaacggcctgagagggctcagctggtccgggtgggattctgaaggccagcggaggtgggcttactagggaaaggggcgcagcagtaactacccgcaactgagcggcgggatctgcggccgcccggggccctcggccaacatcccagcatcctctgcgccgcgccggccccggactccatttcccagcggcccctgcggcctgccctagggctgcggcgcctttgtgagcgcggccgccggccaggatcgagccctggcccgggccctggcccagccccggcctccaaggaccgcgccgaaggaggtgcccactggagggaggaggcggtgaggagcgcgggatggagctgacgccgggagcggccatgccaccatgtgtgggaccgtgtgtgacagtgtgtgagaatgtgtgagacattaaggaaccgtgtgtgacaatgtgtttgacagtgtggaatcgtgtgtgagaccatgtgtgactgtgtgagaatttgagaccgtgtgtgacagtgtgagaatgtgaggccgtgtgtgaatatgtgtgtcagtgtgagaccatgtgggacaaatgtgggactatgtgtgacagtatgagactgggtgtgagaatgtgtgcgacagtatgagaccgttgccccggtgtatgcgggagcctttgacagtatatgggaccgtgtgggactgtgtgacactgtatgtgcttaagaccacgtcaccatgtgtgagactgggaatgtgtgacagtgttaaactgtcattatgtgtagaccacgtgtgaacagtgtgtaagaccatgtcactgtgtgtgtgacctgtgtgtgtgggataatgtaagactgtgtgacagtgtgtgtgactttgtgaacagagcttgaccgtgtgtgtaggattagatgagactgtgacagtatgtgagaccatgtcaccgtgtgtgaggctatgtgtggttgtgtacggtgtgtggctgttgatatgggaccacatgaaactgcgacagaatttgtgtgacagtgtgtgagactgtgtcactgtatgtgaaactgtatgtgaacagagtttttgttgttggactaagattgtatgtgacagtgtttgagattgtgcatgacagtgtgtgtgattatgtgagactgagggagatggtgtgacttagcactgtatgtcatcccgacagtgagtgtgacagtgtgactgagaatggccttatatgacccattgtgagagcagggcgggctacaatgtgggggcatgtccataggttgccaggggaggtgccagaatgagaaactatgtggtttgttgtctgtgatttgtgtgggcaggaagctgtgtgggtgcttggagatgctggtgtgctctggggtttgggagactgctgttgtggtggagagacagaaagattgagataaaggggaaaagatggagaaagggagggacgagagctgaaaagggagagacagacaggagcctcagccttaagcctgaaaagctgaccacgctggctgcttgtcctctggcacagtagtttttccatccctctcagtctctgggggcacgtgaggaatttaaaaggaaaaaggaatgggagacctaccatgtgctggttatgaaaataaatgacagaaagatgaaaattaagcactgtgctcaatgctttatgtagatcatttcagaatcctcccaacaattgatagggaatagttaccatttcactgatagagaaacaggtttgcagtggttacctaacttgccagaggttgtataggtagcatgtggtggtttggctgtttgagaccaggtgttctgatccttaagcctagtagttcttaccactgagttatgccacttcataggtaatggctttattcttcaaggcagtgaggtctgctggacaagaattcaccatagggggtttggatgactgttcaagcatagcctgctcctccctccctctctccttctttctgtctgaggagattgcccagaaaagtcaagagattagttttcagttgtgggttgtcataagccaggaccagaagtaggccgtcttgactctttgatcgagtgtccaccacactacatggaccctctgatactcactctgtgtatagagatgctttctctgagaaatttcactttgtagctttatctgtcatccttgcagaaagggtgggaacatatttcctttcaacatcatgatcgggtggaaagaattaaaagttagaactggtttccagtttggcttaattattaccatgatgccttgaataattactccgatgaagagccttcatgtgtgaaagagggggaaatccttgcttggtaataccattctgtaattgctgtttttgtttt[140 bp omitted]ctcctgggttcacgccattctcctgcctcctcagtagctgggactacaggcgcccgccaccacacctggctaattttgtgtattttttagtagagacggggtt[145 bp omitted]attgtaaatttagatataaatgaattgctcagtgatacctctaatttactcctgaggttggggaaagaaggagaaagagaaggaaaggtttctaggctgatgatactgagagctgcagggcaggcctggcattttatggtttcttttccttctccagctcgactttctcaggatactgtccctctcccacagaggagctgaaggagtaggacagaagaactgtcaaattctggaatccttaaagccatgtccaaggtaaggaagcatttcttctctcttccctaaaatgccatcttattttttaggttatacgaacattttgtttttcttccaaaattctgcaacctaataaggttccattcatccagtgactcgttcctcatatcttgctttccagtaaaagtctccaaaagcctagttatctttttttccacagccagcatttttatcttcactcaagaaatagttcagcaccttctctgggtttagtgtctgttagaagctttcaagatgcaaaaatacactcattggcatatgtaaaccttcattgtagtaagttgattgagactgaggtgtatgttcagatgtaaccactagcataaataaagcttttccatagacctaggtttgaaaagaaggcaagacaggagggttatcaggtggtcttagtcacagaacagggcaaagtctcttgctcaaagtgatcttgaggagtgagatgtgttgagtcttgaatattaaagtgtgggtcagctagggcagggatttttccaggcactccgtgggctttgaagaacagtattccagggaataatgaggtaccattttagggacattctgagtgtccacagctatgttattctaggtcatccagttaagattagtggaattaatatgtaaaaaatagcagaactttgttttggaaaagactaatgggagagcacttgaatctgcattaaaataaaagctgtatatgtctataataatgaaaacagttgatagtgtggaatggagccagaagaaacatacaatgttaagaaacaaatccaagtataagaattccataagaatggaaatcttcattcactgaacatatagttattaaaggccttgtgctaattgctgtgataaataaaaataaataaaaataaacaccttgtgccaagtgctgtgataaataggccctgtctttgtcttcatagaatttaatgtatactagtttattatatgatgtactgatattattttaaatcagtgggaaagggatggattattcatctagtaaaaaaaattctctgcacttagagaaaaatacatagaggttaaatgcattgtataggttaaatatatatatatacacacacacacctctaggttaaaatatggaaaatggagaaagagtaaggtgaggcagatgcagaaatcaactagtacagcactgtccaatagaactttctgtgatgattgacaatagaaatgttctatatctgcagtgtttaacatagtagccactagccagatgtggctacaaagacttgtatatactagcatgactgagaaactgaatttttcatgttaattgatttaaatttagccgtatgtagctagtagctagtgtattagacagcacagtcttaggcttataaaacagtaaagccaggaagataattatgggtgatcttgtccaagtttctcattctacagatgaagaaaaagaggccaggggaagaaagtgacatgtccacgtaaccagttagtgactgagtcagatgtaagaagttgtaataaaaattgagggtcagtaatgtcgatgatgatgagtgatgatatgaaaagggtggtagaaaatgatgagggacactgtagcgagtctgtgatggggctcattatttcactcccatgcccagaaccttcattgccttcctatcttacttggaatgaaatccagtgtcctaaccatggcctataaggccctttgtgcttcaggtcctggctttcctagacctcattttctacaagtatttacctctcttcattttaatcacagttgtgaatttgctgtccctcagacttactgtgctttttcttgtctctggacttttgcatttgcccccccatccccctacatgttgacatagcttgctcccccatttcatttagattgttgttcaaaccttacctcttcatttagacttaccttgactatattatctacaataaacagcctatcactcttaatcaccctttaccttcttttgttttttgtggcatatgtcactacctgacatgtatgaccttatgtttaatgtttttctcctttgttagaatattaagaggaggaactttgttttgttcacctttgtattcctgactcttagaatagtgcctggttggtaataggcattcagatgaattccttatctgtgagtgagaccaggatagctagagttagccacctcttctttcctgctactgatttggtaacagaagaaagaaaaagctgaaagtatgatgtgtagaataggtggaacccattagcccaaatgctgtttccaggaccccaccccagacctcctgaatcatggtctcttggtggcacctaagaaaacacatttttattgggtttcccaggatgatgattatctttttttgagatggggtctcactattttgcccaggctggttttgaacttctggcctccagctgtcttcctgcctcagcctcccaagtagccaagtagctgggttacaggtatccaggatgattttaatgcatggtttttgagaacctctgcctttaaagattatatttaaagtatgcctcttgtaagcagcatataactggctagttttaaaaaagctagcctgataatcttaatcttttagtgtttattacatatttaatgtaatacttatacgtacgtgcttaaagctactgtgtttctgtttgttttccatttatcccatctgttcttttttcctttgtttctccttttttgcttttttttggttaagtcaggtatttttccttattattttagtaattatacataatttttattgttcttttagtggcttttctaagataatattcatccattactcatatgtagtaatccttctttcttctgtaatcttcctcctatgattagtacccttatcacttcctgaacaggataagatgcctatggtgatttaactccacaatattcttattgctctatttgtaattactgctttagaactcttaatttcttcctgtgttttcatgcttccattttccttctgtattactaatacctgaagaactcttcgagtatgtcttcgagtgcaagccaacactttactcccaccctgaattgttttttcaattcaaaaacaatttgaccgtatcgttgctgggtcaaaatagtgtaattaaaaatttttttgaggttaagtaattttgtgaaatcctggtctcaatggagagaatgacgtctgtgaatcgattttaagaaaataattca[133 bp omitted]ccaacatggtgaaaccccatctctactaaaaatacaaaaaaattagctgagcgtggtggtgggcccctgtaatcccagctacttgggaagctgaggcaggagaattgcttgaacatgggaggtggaggttgctgtgagccaagatcgcaccactgctctccagcctgggcgacagagcaagactccatgtcaaaaacacaaacagcaacaacaacaaaaattaagatttacccaactgaaaataagcatgggggttagtaaataagatagggcataattatactgtataatagtactcagccaataaaagtgacattatcagtaagtgaaatatatacataatcatagacattagtataaggaaccgtttgagcagattatactaactataaattataattgcttttaggaggtagggtgacatgggagtaggcatgggggtgaaagacttccaattctttaacttaaaaagggaaaaaattggctgggtgaggtggctcacccctgtaatcaatcccagcatcctagcactttgggaggcccaggcaggaggatcccttcagcccaggagtttgagaccagcctgggcaacatagtgagacatcatctgtaccaaaaaaaaaaaaaaaattacctgtgcctggtgatgagtgcctgtggtcccagctgcttgagaggctgaggttgggaggatcattcaagcctgacaggttgagactgcaatcagccatgattgtgacactgtactccagccttggcgacagagcaagatccggtctcccaaaaaataaaattaaaacaaaggagtggggggaaatcactgagggtagaaatactggaaagtatattttaagtttctttaatgatggcaatattttaaattaaatcaaagtaaatataaaaaaatgtacaaggtattcatggtctcattggctgacaggaaaatgtcagatagttaaaacacagactctattagttcatgtgtgcagctaaaaaatgtctcaaggacttcatgtagcaaaagctgcttcgctaatgtctacagaataaatgatgtgtgtggaacactttcccgcacaaaattttaaagagtttgtattgaagtatttgagttacagtagaattgatgattagcagcgcccaggcctatccagcacgagttttaatttttagacctgattcacattcttttccttctttgaagctacaagtcacttcctcagatttccttgtattaagaaatgtttcagagatagaagctttttaagcagctgatgcgtgtaattgatatttcttggagccatacttttgcttcctttatagataacctccttaacatttttgtgcatttttccggcagtagcaattaacattgactcatttttttttccattaaaaaggtttctaaataaaatcactgatgtatttgagtatttcttcaataggagcattactctgcaaagagtcatataagagtaggggtgatgttcatatttgacaaccaacaaggcaaaggcacacagcagaacttatcctagctgggatcctggagtttgctgccatgctgggcattaatcttcagttgctgaattccttatggagaaatctggtgtggtcactagcagcactcagtgaagtagctgtttatcaatgagtgtggcagtatttcagtatttaagaaatcagtatgttcaggtgtgtaccattgaatgccatctctatgtcagcccagcttaagagcaggctctgtgacatgtcaaaaccaagatgcatatgcctaaccatacaacaagccctgataagtcttgagctgatttatcttgttaggaagaagacccatttttaatttttagggagcaaactaggtcttgttccgtgttatcttaaagatccttaattcaacattcggtagtattatttgggagctgtactgtaacatttttaaaactctcttgctcatcaaacaggcacaattgtgtatgtttctctagtgagagctgtagatattttttgatgcattttattatcagacttggagacattcactaagtaaattaatagtgcttaaattactattattttgtctcatgtagcatgattataagttaccaactatctttacaacttagtggggttatcaagagctgttaggcaatcatttgtcgcctcttacacacagtctcaggaaaatttttatttccaatgaacatttgtcccatattgaagtaacttttattgtacttctttgattccttcttatcaagtactgattatacagattcaaacatttattgtaatatcactcttcttcttctcaagacattagaagtcatagtctttgagatcaacttcattttatctgtgacaaattttttcttgttttgattcagatacctttttgtttgtttgtctttagaaacggggtctcactatattgcccaggctggactcaagcatcccaggcaatccttctgcctcagcctcttgagtacctggggctttaggcatgcaccaccacacctggcctgattcagataccttttgtgacaccaagctgctggtcatctaaaccatatgccttccattcatttaaaccatctacaggagaggaatttgtgtaaaacaaatgtttaaaattcaacacacacaagacctaggttgtcattgtgaaatgtgtaatatgaaatgtaaaaaatacgtgagataccttaggtcatcagtgagatgagatgcatcactttgacagctggttggcaaatgttgtctttgccaccaagcacaaattcagtggcatactttcacacatcaggtgatctgtcactcagcttcttgattgctctctgttatggtatacatttaagccatatttttgcaagtcagtatataactttgtttactgtttctattatatatttaattttggaaagtcaatataagcatcaaacatatttatatatatttttatacaaccttattgatgtctctggaacattgaccattccattgtactgagtttggaaaaatgccagattcaaccatgtacacattataaagcttagcctgtttcctcctcgaagctctttactgccccggtgtatctgattttccaatattgagaaatgctctggcatttagtatgaataacatattttatactttatttacagtgttctgttgttttccaattttgtgtgtgtgataaatcctttctctaccagtaggattatctctcaaattgtatactttccatgacagaatatcaaaacaaagcacaaagaagtcatttagcaattacctgacatgtgttgctcagaacctaagatactgtcagaaagttttgctatgtgcaatatttttctctaaaagtatagacaatttaactttttaacttaggctcatgtgaggatatgaacactagttgagcaagaatgtgtttatgtcatttcaggatttggtgacatttggggatgtggctgtaaatttctctcaagaggaatgggaatggctgaaccctgctcagaggaatttgtacaggaaagtgatgttggagaactacaggagcttggtatcattgggtaaggacatgtccccttaattcagaatctgtacatgggactgagctccaatgtaatatttgggaaacctctgacgtgcttcactaaatttccttttcttgtgcttcccaaaataggttgaatttgtagaattggcagcttcatcttccccattcttattcctcagctccctcccattattctcccaccttcttgatgatgcagaaacttgatcttatttatagacctgcctaattccccttttgttttttgtaagcaggagtttctgtttctaagccagatgtgatctcattattggagcaaggaaaagagccctggatggtgaagaaggagggaacaagaggcccatgccctggtgagtgagagagaaatagggagacagaagccattgccaggaaaagctcagcaattctgaaagatttcagttcataattgacgtttcctgggtagctcttcttaaagactcaaagcctgggaagaaatattgaggcatctttagtatgagctcctcaatttgttctctctgtctatattctctcacaagttacagtcttctctgacagtaatcttctctgataacccattttcctattgttggatccagatgtcacagcatctccctgtccttgccttttagttttatacaagttgcttggtttcattttttaaaaatccaggtgcctgtaatcccagctctttgggaaaccagagtgggtggatcacttgagcccaggagttcgagaccagcctgggcaacatggcaaaactaaaaatacaaaaaaaaaaaaaaaaaaaaaattagccaggcctggtggcacgcgcctgtaatcccatctatgtgggaggctgaggtgggaggatcacctgagcctgtgatctgagatcgcgcccctgcactccagcctaggtaacaaagcaagagcctgtctaaaaaaaaaaaaagccaggttatttttgtttgttttgttttgtttttccctttctcagttactcattccttttagattgaaggattgatgcatttatttatttatttattcttttaccaagcctcattgactttatgttttgagaagaggattctgctaaattcttgggattattcagaggcttatacaccaacaaagaaaaaagaaagccaattttattttcaattctgggtaactagaagatgataacacttaatagaaacaatcagaagcaaaagttgataggaggaaagatgaaaaatttggctgtggacataagagggttatatatataagatgaggagagttccaagcaaagaaatgcaacatgcaactggtttagaagatgggggctcagaaaaatagaatgatttagagatgtcagtgtgaatgaatgagatcactggtcttaagagtttgagagataaagcctgatgctgaggcctttgtggggaagtgaatctttgataactttctcagtatcctccatggtaaatggcatctctataatttgtctttggttaatatatatatatttttagatgaggtcttgacctgttgcccaggctggagtgcagtggtgcactgcaacctccacctcccaggttcaagcaattctcctgcctcagccacccaagtagctgggattacaggcatgcaccactacgcccagctaatttttctgtattttaagtagagatggggtttcaccatgttggccaggctggtcttgaacttgtgacctcaaatgatctgcccacctgggcctcccaaagtgctgggattacaggcatcagccactgcccccagcctgtctttggttaaattttatgcattttaatttttctagataattgtccttttcatttaggttatcagatttcatgaatttgagcaaaataatctacaattagttttcttttatatgtataatggtttccaattttaattttttattttgtg[131 bp omitted]aaaccctgcctctactaaaaatacaaaaattagccaggtgtggtggcaggctcctgtaatcccagctacttaggaggctgaggcagagaatcacttgaactcaggaggtggaggttgcagtgagctgagattgcaccactgaactttagcctgggagacagagtgagactccgtctcaaaaaaaaaaaaaaaaaagaatacatttattaggttgctctactcataaatcagtttatttttaaagaactagcttatggatttatgtattcatattcttttccaattttgtgtttttttctgtactaattcataaaatattttctccttactaattctttccttctaattttcttatttattttgatttccatagtgctgaaatgagagcttaatctattaatttaattcttttatttagtaatgagattattaaggactacgaattttcctctaagtttatctttgtctatctcctgtagattctgatacttagtgtttttgttactgctgttcatactagataatctaccttaaacatttttttctttcacccagagttgtttaaaagagagttttctggttttattgtatttgatcagacagtgtgaaggaattatttacatacagtaaactggatacatataaattgtacagtttgatgacacttgcatatacccatgaaactgtcaccacaatcaagacacatttagtatttctatcaccccaaaagattgcgtgtgtctctttccatctatcctactctccactcccagttccaaacaaacatgaatctgatctttattttttattaatttgcatctaaagtaaatggaatcattcagtatgtattttgttatgtctggcttatttcactcaggataatcatcttgaaatttatctgtattgttgcatgtatgaatgcaacatttcatttatccattcacctggtgatggacatttgggttgtttccagtttggggctattataaataaagttgctatgcagctgtcatgtacaggactttgtgtgaacatatatttttatttttggggggtaaatacttaagatggaagaactgagttatatgataggtatatgtttaactctgttagaaactgtcagttttctgaaggaattataccattcttctagcagtgtatgagacttccagttaatccacattctcaccaaatcttggtatcgtcagtagtatttttaattttagtcattctaaaggttgtattgtggttttaatatgcatttctggaatgactaataatgttgagcctcttttcatatgtttactggccatgcatataacttttatgaaaactttgttcaaacatttttcccatgttttattggattgtttatcttatgatttgtaagagttctgtatatagtcttaaaacaagttctttatcatttatatgtattggcttatatgtatgccaattatggcttgcctttttgtttttctgctgccacctctgttggaggcaaagtttgcagtttttgtaaaatccaatttattaatttgtcttggttggtgcttcttatatctaagaaattcttgctactcccaggtcacagagatatttttctaggagttttaaggttttagcatttatatttagctctgtgaatgattttgagctaatttatgtgtcttgtgtgaggtaaaggttgaggttcatttttttttccatatggatatacagttgccccaagaccctttgtcaggaaagactttcccttcctaattctatcacctatcaccttgctacttttcctgatcattacttgaccacatatgtgtgggtatggttctggaatgtcttctgttccattgatctatatgtctattgtctcaccagttccatactgccttgattactgtagctttgtagtaagttttgataccagatagagcaatttgtaaaattgccttgactgttttagatcatttgcatttcatataaattttagaatgaagttgagaatttctgctcaaaaaacttagatttttgttgggattacattgattctgtatgtcaattgaaaaaaactgacctcttaacattgagtcttctaatataagtatggtttattaagccatttattagtctttaaaaatgtcttgaagttgggtgtaatggtgtgcgctggtaatctcagctacttggggggctgatttggaaggattgcttgagtccagaacttggagactagcctggacaacatagcaagactctgtctgaaaaagaaaaaggaaaaataataaaatttatcttaagaatattttgcagtatccagtgtagtggtactctgttaaattttttttcctaagtctgtaatagttttttgagtgctataataaatagaattttttttaacaattcagttttctaatagtttgccactagtaggcagaaatgtaaattgatttttatattagctttacatcttatgacctcgctagattcatttaatggttgccctcacagttattttgtaggtccatgaggattttttggatggacaatcatgctatctacaaatacagtttttttttccttctgatccttataccttatttttcttgatatattgcaatggctaggacctcctatataatgtgtaattgaaggggtaagaggaaatgtacttgtgctgtttcaatcttaagggaaaacgtattctgtcttttactattaagtcagtgtaagctgtcagtttttcttagatgtccttgatcagtttgaaaacgttactttctattcctggtttgctgataatttttataataaatggatcagatactatttctacatctgttgaaatgatcatgtgattttttttctctttaaccttttaatatggtgaattacattgattgattttcaaatgtgaaaccaatcttgcatttttgggataaactctacttggtcaagatcatgctgttaatattttcctagatttcatttgcacagttttattaaagattttgccttatgtacatgtgctacattggtctgcaggtttactttttttttttttttttttgagatggagtcttgctctgtcaccaggctggagtgcagtggctcaatctcagctcactgcaacctccacctcccgggttcaagcgattctcctgcctcagcctcccgagtagctaggactacaggcatgcgccaccatgcccagctaatttttgtattttttagtagagatggggt[143 bp omitted]tatcaagataatactggccttatgaaaacaagttggaaagtgtttatctttctctattttctgacagtttgaataaaatggtattatttcttctttaaatatttgatagaattcaccaatgaagacatctgggcctgaagtattttttacataacagctttaatggatatagggttaatcaggttatctgatttttgttgaatcagctttggtaggctgtgtctttcaagagatttctgtgtttcatctgagtttttcaatttattaatgtttttaaaaaacagctgtaggctatgtaatgataactcctctggtgttgctgatatctgttctttttttcttgataactgatgttttaaaagaacctacttttgttttatttcctctgttgttgtttttctatattgttaattttctttcttaactttttcttctactttccttaagtttactttggtcttttcctcacttcttgaggtgacatcttagattattgatttttagacttttagttgttttctaacataagcatttgaaaactgtagatttttcctttaagtaccattttagctgtatcccacagattttgatatgttgtactgtcattatcaaccaagatattttctaatttctcttgtatactctgacccatgatttatatagaaatgtgtttagttctcagatgtttggagttgactaggtattattgatttaaaaatcaataacctctaacctctgttgaggttagagagcatactcatcttggtttcggtactttgggatttatggagacttggtttatgccccagaatatagtctatcttatttactgaacacattgtgtgcactcgaatacatgttgtacaagtgtttggtgtagtgttgtataaatataaattagatcaaagtagttaaccctgttgagatcctctttgttactattttttcctagttttgtcagtttctgagcaaagcatgtgttagttgcctattatgactataggattacctatttcttacactttcaatttttgttttatgtattttgaggcgttatattaggtgcacagacattaaagattatttctttctgatgaattgatccttttattactatacgtctctatctttggtaatactcagttttaaagtctattttatctgacgtgaatatagttaatctagccttatgcttactgtttgcatgttacatctttctttatctgtattattaatgtattcttatatgtaatgtgaggtttctataaacagcatataattgtgtctttcattttgttgattcctataagttctgccttttaactgaataaggagttcattaatatttaattatttatataatttgagttgagtctactattgttttctctttaatatttctcattaaaaaatatttgctcatctctatcttcttttgggatgtttgaatattttttataattccattttattttatctgctggcttgttgtacctttttatattatgcttccagtgggtgctatagtgcaatgatgctcaaaatgtcgtcttgagaccagcagcaccacctgtgaatttattagaaacgaagattctcagccctcaacctccactaactcaatcaaaaactctgtgtgtggggtatagcaatctgtagtttagcaagttttatctaattctgatacactctaaaatgtaagaatcatgcctgtaacgattataatatctatccttaacttttcagtctaatgagaattagtgtttttacttccttattatagttttatcaacttaattctgggtttaattagatcattgctccttggcagtcatttcatatttcttttttgacccatcagtcttcagaatttaattttcatgttgactttttatagggcattcatgggtgtgatttgcaactgtttagagaggaaagtggaatttggaagggcactgaggcagcacagcggaattagcagcctcaatttaagtatgttgccttcagattcttttccttccaaatatcattatccactgtaatatttaagtttagtggtaatattccatttggtttcagacatttaccccattcatgcaagcatgtcattctaataagaggatgaattagtgtggtgttttatgtcttattgattcagtatttattccaaagatactaagcaccttctatctgtccaggctattttaggcaatgggtgttcaagggtgagaaaaaaacttcctgcacatgaatgtttacattctaataagaatagagagtaagttaacatgtaatatgatattaaataagttaagtgctatgaagtgcaaagcaggaggaaagagaaacataagagtgtggaatacttcatattggatgttcggcaaaggccatactgaagaggtaatatgtgaacagaacctcaagtgaagaagtgcaatgagagaagggatcaagcagatatctgtggaaagtgcttttcaggcagagaaacagcaagtctggtgctcctaaagtggaaataaagtgaattcccatatgactgaagtggagtaagcaagcaagggagtagtagaagataagatcagagaacaccaggtcatgtagagtttcataaaccaaggtaggaattttcactttattctaaatgtagtaagaaacaggaaaatcttaagcagaaaaatgaagtgatctgatttggaactggacaggggaaggcagactaagttctgtgctaggttagtaagaccaagcagtttgatacaaaactactcttatatgaaggcatcttagctgcagggatcaattgaaagtttacatatggttggagtttgttacatagaaaatgattttctggaagacttttttctaactacagatgtttacccatagagttttatgaacaatatgaacaaccataaagttttacatgtatcctaataaggatattaatactgcctactgttgtttttaggcctgggattccaatggagtttttaatcatattaacatcataaaactggcttataaaagataacttagcttgaatgcaggataacctatgacaagagaggaaaggtgtttgaagtctgttattaacttagatataaaaagatgattatgatttttagaataccaccttcattgttttgttcttatatttaccttactggttgtcaatgattatttccttaatcaactctcttaaattcttattatttataatgtcattattttagaatgcattataagcttttaaatcctttaacttgtgatgtattttattcacgtttttgttttagaaatttcttctagtgaattaaatacaaaagtcatttgtttcttgatatcttttagattgggagtatgtatttaaaaacagtgaattttcatcaaagcaagagacatatgaagaatcatccaaagttgtgacagtgggagcaagacatcttagttatagccttgactatcccagtttgagagaagactgtcaaagtgaggactggtataagaaccagctgggaagtcaagaggtacatcttagtcaattaatcatcactcataaagaaatccttccagaagttcaaaataaagaatataacaaatcttggcaaacattccaccaggatacaatctttgatatacaacagagttttcccaccaaagaaaaagcacataagcatgaaccacaaaagaaaagttaccgaaaaaaatctgttgaaatgaaacataggaaagtctatgtagaaaagaaacttttgaaatgtaatgattgtgagaaagtcttcaaccagagctcatcccttactcttcatcagagaattcatactggagagaaaccctatgcatgtgttgaatgtgggaaaacgttcagccagagtgcaaacttggcgcaacataagagaatacatactggagagaaaccctatgaatgtaaagaatgtaggaaagccttcagccagaatgcacacctggcccaacatcagagagttcatactggagagaaaccttatcagtgtaaagaatgtaaaaaagccttcagccagattgcacacctgactcagcatcagagagttcatactggagagagacctttcgaatgtattgaatgtggaaaggcctttagtaatggttcatttcttgctcagcatcagagaattcatacaggagagaaaccttatgtgtgtaatgtgtgtgggaaagcctttagccatcgtggatacctaattgtacatcagagaattcatactggagagagaccctacgaatgtaaggaatgtaggaaagccttcagccagtatgcacaccttgctcaacatcagagagttcatactggagaaaaaccttatgaatgtaaagtatgtaggaaagccttcagccaaattgcataccttgatcaacatcagagggttcatactggagagaaaccctatgaatgtattgaatgtgggaaggcctttagcaatagttcatcacttgcacaacatcagagaagtcatactggagaaaaaccctatatgtgtaaggaatgtaggaaaacatttagccagaatgcaggccttgctcaacatcagagaattcatactggagagaaaccttatgaatgtaatgtttgtgggaaagcatttagctatagtggatctcttactctacatcagagaattcatactggagaaagaccctatgaatgtaaagattgcaggaaatctttcaggcagcgtgcacatcttgctcatcatgagagaattcatactatggagtcattcttgactctttcctctccctcaccctccacatcaaatcagttgccaagacctgtaggtttcatctcctgaatatttctggaatccacctcttgaatccatttccatcccatcatccttgtccaatgcacattaatatatttgacatgggatactcgagtagctttctaattggtctccttgtactcaccattgtctctgtcagatgtccacattgcaaccaaatttgtatttttaaaaatatgtttaatctcatttctccctcattaaaatccctcagtggcatcccatggtttttaagttaaagcacacattcttcaaaatagcctaaaaacctagcctctaacaccttgttccaggttaccttccaaagtttctatcttgtgtcactatccatctcattctctgaatacttatccaggattaagatacatattccaggatcaaaaagacctgggttccaatctttgcacttccatttcctgccctctaatttgggggcagcagtttgtgctttgtaagcttcagtcttatttatagtgtgggaataataatggttctacctcagaagttaatagaagaatgaaataatgcatgtaaattgctcagcagcgtgcctagcataaagtaattactcaaaccataatgtaaagtaaaaagataaccatactatacatagaaagccaatcatctcagccatgattatctcagaaataaaaagagatgcagcagctcaggactgagagattgtgaagtttttttttttttaggaatggtaggcatttttctaaaagtaggtgaggagggtatctaacagtaggatttacattagagtccatgatatagggtaagatggtggcttgtatcagcattcactggatatttaacagttctaagatgctaatgtcttattttaaaagtctttttttttgagatggagtcttgctctgttgctcaggcttgagtgcagtagtgcaatcttggctcactgcaacctccgcctcctgtgttcaagtgattctcctgcctcagcctcctgagtagctgggattacaggcctgcaccaccacgcccagctaatttttgtatttttagtagagagagggttttgacatgtcggccaggcttttctctaactcctgacgtccggtgatccgcctgccttggcctcccaaagtgctgggattacatgcgtgagctaccgtgcctggcctaaaaagtcatttttaataagacagtttactgagatgtattcatcatttacatgtaaacaaaggcaaaatcgaaattaaaaagaaatcttgaaacaagtcagtaaccaatgatgagtagaaaataaagtataagtttgaacccctgttctaaatctgggtgaatgaattatatcaaatctatgtcatttaaaataataaaggttgttaaattactaaaatttcaaaactagtgaagaaaagaaaccaaaactgtaggtcagttctcataaactggcccacaaacatgtttgattctgtatgcattaagtttaaaatacatatgaataccttcagcagaccatgtgttttccctttctccaacattcaaaccactccctgattctttacatctgacctcttttaatattacttcctgaccccagaattcttttggcatataatcaatgcagtgatcaattcacatgtgactatagatacaaacagaatgacgaaagtttaatggaggatgaaaaagaagacaaataaatattttatcctttatatggtaagacagattcactatcatactgatgtcagtagcccatgaattaatttacagattctacctaacaaaattctaataaattttgtaaggttttaacatgtatgtgtgaacatacatattcatgctgttacacatataaagaaaattataacaaaagtgacctataccatcagtggtttaacagttttggaaaaatttatcgtgctctatacaacaattcattccatatgtgaaagttactttcaagtgctttatctaaatgtggaacaaacagtgattagaggagtctgtgacacactctaatcatggaatgagactggccttcctaaacatgagattcagaagcctccccacctcctgtcaacaagtcatagatttgactgtataagaactttataaagcttttatatgatcaaagatagtaaaagatacaatattttttaaacctaagaatgggagaaaattattgcagcacatataaactatggaattcatatccttaacataaaattgctcataaaaatcccttaggaaatgacgcttttctccagctcatagtcaaaggatatgaagaggcaacaggtgaccaataaatatgtggtaagtactaaatctccctaggatcagaagaaatacagtttaggccaatgaaatactatttttttcaatatcagattaataaaactgcattgaaagcatacaaaaagagatactatgcactaatttaaaagagcatgagtttgtacaaactctggtaggcaatttgtcaacttcagaattttaattgggaaaagtagaattttattttgaagttcaaaaactcggcacacaatgtctttccctccagattctattatacacatagaacaatgtaaatgattcttaaaaaaaaaaaaaaggtgaggcttttgagtggatgaaataattttgtaaaaggcaaaacagggaagagtgttcatgaattgtagcagaagatgctgcatgttatatgcgaatgaccgaagggttttaaaaatggaatctagtctgcccaaaggatccctagagaagttcaggcttggagttggcttatgtacaggctgtggcttctaagaagacatgatgaaaagcctcttgaagcctttgtatgtgaaagttatgtcagtagcccttgccaaaagcctcctcactctcccctctcttgtataagtaaattgaatgggatccttatttcacaccattaacaagtataagttctaactgaataaaaatctaaatgtaaattactaaagcaaaagtattagaaaaaatatagtgggatatgttaacgactttggtgtcagacacgtgtttctaaaatattcaaataccataaaggaaaagattgataaaattgactgtgtcaaaaaatagtgtgctttggctgggtgcggtggttcacacctgtaatcccagcacttcgggagactgaggcaggtggatcatgaggtcatgagttcaaaaccagcctggccaagatggtgaaaccccatctctactaaaaatacaaaaaattagctgggtgtggtggcaggcatctgtgatcccagctacttgagaggctgaggcaggagaatcacttgaaccatgtggcagaggttgcagtgagccaagatcatgccactgcactccagcctgggcgatagagtgagactctgtctcaaaaaaaaaaaaaaattattgtgcttttggccaggcatggtggctcacgcctgtaatcctagcacgttgggaggccgaggcgggtggatcacctgacctcaggagttagagaccagcctgatcaacatggtgaaaccctgtctctactaaaaatacaaaattagctgggtgtggtggggctacctgtaaacccagccacttgggaggctgaggcaggtgaatggcttgatcccaggaagcagagaatgcagtgagctgagatcgcgacattgcactccgacttgggtaacaagagtgaaactcggtctcaacaacaacaaaaattagtgtgcttttaaagaaagttaaaagataagcaacaggaaggaagaaacacataacggacacatgtaagaacacatataagtcaataagtaaaggacaactaagcaagtatataaatgtgcaaagatgagaatggccaaattgtggaagacatacagatgtctaagtctctgcttaacctcattagtattaagttatgcaaatttgctcatttattatttatttattttgtagagatgaagtctcactttgttgctgaggctggtctcaaactcctgggctcaagtggtcctcttccctcagcctcccaaagtgctggaatcacgggtggagagattcaaattgagacagtataataccagatattggtcgtggtgtggagacaggatttctcatcacagctactttagaggcagtgaagtttttaaaatgctcactatagccactttgtagggtacagttagtatttgaaacactgaaaacaacctaaatttctatcagtaaagtaatgactaggagttctatgctggagtttaaaagaatgggctgataatattgatacgaatttgactaaaggacttactggttgaaaatgtaaaaatttcgcatacactattgtatatttaaaaatatattttatttctaatgcatttatagaagtatgcaaatgcttagtgaaagttctgaacagacacccaactgataaatgtttcctctaggaagggactggtattggatgctctggtcaaaggaagatttagtgttatttgtactgtttgaagttttaaacatcaatgtaataattaaaaaaaaaactttaacatgaaaaaattgagtttacaacgaactggacacctagaatgaaaagttggcagtctaagttaaaactcttttttggaatttggagcatctctccttgacttgccagcccttcccaggcatacagataccctggtaacccttccaatttaggcaaacagacctacagtggaaatatacaaaggaccccctggcatttacctatggtaatcaaaccatgtaatacttaaatggcaactgatagctaagtatcatcacttgaagaaaaccaccagcataataaggaccaagagatataattgaatcctgagtggggaaagtcatgtaataacagaagaaaatgaaaaattgattttagcctgcaatttgaaactacaaaataaagggaacaattagataagaactaagaaataaaaaaatacactgtaataaatttaataaaggttagaaagaaaagaaaccttagatgcataaattaaaaagaaaaatgagaaaaagggacatggaaatttacaaggtccaatatcaatgttttgggaaaaatttcacagaaaatataagaatgtatcgaatgactgagaatctttctaaactgaaacaaggcaagcatgttcagcttgggttagctcactgaatgttgtataggatgaactaggaaaaccacaacaggaaaatccagaaatatgcttgtgaaatttcagaatattaaagaagaaaacattctaaaagctttcaaaaatgattaggtcacctaaaaaagaacaacagtcaagatgattttagcccttcctcctatcataaatattggatagaatacagaatagcactttccaacttatgagataaaattactttggacctagaagtctatacttggccaacaatatttaaagcatgaggccaaatattgatgttttcagtcatggaatttatttccattatccaggatattaaaggagtcactcaagcaaaatgtagatgaaaaaggaagaagacagcaggataggctgaagtgaacagtggctgtaacccaagaaactggagttgaggattacaaggatacccacttggcaataagtgtagaaaacaatccaaccaaattattggtagactaagaatccagggagccagtgaagaaaaactttttgaaggatggaatgagttccattaaacagaattcatatgaagttggaggatcttagcaatatgatggagataaaattttgttcatacgagaaggaaagaaagataattactggctctgggaaagacaaagaaaaaaccaaactagatatcatagtcttaacgttaagcaactccccatgaaatgttgcatgattttagaaaactgaaaaaggaaaatccatttgatatgacgatagttccctttgagtgagtactaagatcataacattggatgtgtagaggaggaatgtaatctttacatattacttggctctggctcttcagagaataacaaatgttggtagtaatgcaatgctattttattttatacatttagaatatagaaatcactgaagtattatctgtaacataaatatctagtaatgtgaaaggcagaatatagctgattgattggatggtggaaggtagattggaaaatgaaagattgaagcaaggataagtggcaataatctcattgtgcagaggagattcaggagatctgcctaaagttgacagaataagaaaatacaggttagctatatttcaagttaaaaatgcaacaaatgtgataaactcacatgggatgacttacatcctttcctttcataaaagacttataaagagcgtataaaaataaatccagaaacagcaacagtagtcaggattgatagaaaccaaacaaaattagtttaggaaacaggttattgattcttgtaactaaaaagcattgaacatgtatggcatagtgttaggctggatttaagtgctcagacttatcagaggtttgtaactcagctctgctttcagtagtttccttctctccaggttctgtctcttggtgggaaagaaatggcatctgaggatattagacttaaaatgtccatagaatatttaatctcaaaagtagggcaatatctctgtctctctgcctccgtgtcaatccctgggaggaaaatatgatttgtttcagttttggctgtgtgcccactctgaaccagtcattgggtccatggtatgtggggtactctagccagcctgtgtcaagtgtacatgcctcttccagagagactgaatcactgaactgaccaattcacaaaaaaaacacacagaattggggctggttgaagggaggttgagaatcagctctcataatggcaaaacctgacctgaattgacatgagggtatttattgacattgatcccagttagtataaacattcatatctttttcttcagaaatattaatttgttcaattcaggggtgctgcctcagactctgtagcataggtaagttacatgtctgtgggtcaaatggacatagcacacagtggcttgtaattaaactgtcttgccagtaatccagagaaggttgcatgataaagtaaccccagcagaaagaggctggggctgtggtgacaagaattggtttagcatcacctggatccagcatgccaggggacttcaggggagttccttttaagacactccacagaaggcctccctcacagcaagtgtaagagatacaacccacagaaagtgagacagttcacgggggttccttttaatacactccacagaaggtctccctcgcagaaagtgtcagagatacaactcacagaaaatgagatggtttgcatgtataaaggaaagcagatctgatctatagagactgtggccttcaggtaaggaacttcattttcctactcccttatcctattctccacagcagagtggtagactggtgtattcccacaaggaaacaagtttgaatatatgtgtgagaagcctttaaaaatatttactaacttctgcatttaacaagatggaattaagtagtttctgtttgtttctcctttctgaaaccaagttaaagcaacaagagtaagaaatgcatgtagaggcttcgtctttaatgaagtgaagaaacatctataattctgagcttcaaaatccacaaagaggtgcggctaaatgtggtgagaatcctgggaaagaaactactgctgcattgaggagcacagaattttcctaaagcagcagcatatctggaagggcaaaagaaagggcaccttggttgcagccacaacatcacttcaaacattctggctttggaagcactcgtaaactctattatagttgcagagtgtcgtgtgagtgacaggagggcttaaggaggaaatgca[146 bp omitted]ggtggtgggcgcctgtagtcccagctactcaggaggctgaggcaggagaatagcgggaacctgggagttggagcttgcagtgagccaagatcccgccactgcactccagcctaagcgactgatcaagactccgtctcaaaaaaaaaaaaaggtttatcatgtaatagaggaaataaaatactgccagtgatgtgcaagaatgcaaagtaaagactaatccttgctactcaaaagtctgcgccatggaataacagcatcagcatcacctgagagtttgttaaaattccagaatcttgggccttaacccagacttaatcattcagaatctgcagttttacaagatctccagatgatctgtacacattaaggtttcagattcactggggtaaaaccaattatctgctagtgtaaagcactgtcctttgataaataagtagatcaggaaaagctcatttcattcaaaaattaaaaactccagccattcgcagatcttatcgataatggtaagctcaaaattacagaacaccccttcattaaaactgaacaaaatgaaaagaatgtgctagcatcatggaatgagaaaattgcactacctcatatcacatacttgaaaatataatacagaaatagtaagttcacactacaacaatgtgccagcatctttggtagtctctgccctctgggaaaagcagagcgagagaaagtctccataatggaggaaaagtcagaagaaaatctgaaaaaatttcactgatatatcctgatagttgtgtggggaaggggggagatgcaggcagcaatgaacaaacatacataaaattcctcttaagaatcctacttcactctagatagtagtttggataggaaagacaagttggtaatatatgttaaatatacctacgttttgacccaataatttattctctaaaaatattggtaaatctttacaaaagcatatgtacaagaatgttaattgcgatattatttaaaaaaattaaaaatcctagattcctcattattaccgccctctctaaatgcttatctgagatctacacttctggcaaagatggagtcctagggaataatttaatctcccacctgaaatactaaaaaacgacaccaggcaataaaataatgatccctgagaaattagaaacaaatgaggtgagtcctatgatttccccagacaactgcatgtagtttccaggctgtggtacagatctccacgaattaaggtgatggagctgggagtcagggagatcaaggtggctagagttcccaggatagagagtttgagaggagacagctctcagaaaagggaaaaaaaagcatctagtaatctacagtgtgttcctctttttttttttttttttttatctgagtacagatcagaatatggatgtgaagcaactacctgaaattggggaaagaacttaaagaactacaaggagaaataaacaaatccagaattataattggagatttcagcatgcctctcaatagaacatataaatagaaaaaatagtgaggatattgaagacttgaatattatcaccaacttgacctaactgacatttgtggaactattcaccccaagaagagtaaaacacacattcttttcaaatgaacccagaacattcacccagacagacaataattccagaccttaaaacacatatcagtaaactgaaaaggactgaagtcatacaaaatatgttttctaaccagaatggatttaaatcaataacagaaaagtaattagaaaacacccaaatatttagaacaaaagagcacacttttcagtaaccatatttctaagaagaaatcaaaagggaaaataaatattttgagttgaatgaaacttagagaaaagtacatcaaaatgtatgggatgtaccacagtacttggaaagaaatacagtggcactaaatgccaatgttacaaaacaaatgactcaaatcagtgactcctatttccacctaacaaattagaaatagaagagcaatgaaacccaacgttaacacaagaatggaaataataaaaatcagaatggaagccaatgaaatagaaacctgaaaaacaaaagctggttctttgagaaggtcaatgaaataaacaaaaaaattgcagacaattaaaaaagagattatacaagttatcactatctggaatggcagatgtgatatcactacaaatgatagttattaaatgaataaaagaatgttatgaactttatgcaaataatttgacaatttaaaaattcttgaaagaagctaacaaggttta[138 bp omitted]atggtgaaaccccgtctctattaaaaatacaaaaaaattagctgggcgtggtggtgggcgtctgtagtcccagctactcaggaggctgaagcaggagaatggcatgaacctgggaggcagagcttgcagtgagccaagatcccggcactgcactccagcctaggcgacagagcaagactctgtctcaaaaaaaaatggaatttgtaatttaagccttccaaatattttcagatgtctgtgtttactgcaactgtaattctggtatagtcaaggaacatagtttgcaaaataatttttttaatttatcaatatttatactctgtcttggtaaatgtttcatgaacacttaaaaggaatgtgtaccctgcctggattgtttggaatattttatattaacaaatgtcaaccaggtcaagttggttgattatgttgttgaggtcttctatatcttttttttttgtctacttgttctattaattaccaagaggagtgatgaagtctccaatgacaattgtcagtttgtctttctctcttttcagttctatcatttttccttgcaattcaatgtgtactcatttagaattacattttcccggccaggcgtggtggctcatgcctgtaatcccagcactttgggaggctgaggcaggtggatcacctgaggtcgggagttcaagaccaacctggtgaaaccccatctctactaaaaatacaaaaattagccaggcatggtggcaggcacctgtagtcccagctacttgggaggttgaagcaggaaaattgcttgaatccgggtggtggacgttgcagtgagctgagattgcgccattgcactccagcctgggagacaggagtgagacgaaactctgtcttaaaaaaatcaatcaataaataaatacattttcccagtaaacagaacttttatcattatgtaatctcactctttatccctgattgtattccttgttctgaagtctacttcatctgatagtaatatagtcatttctgcttttttgttaatgtttgcgtggtgtatctttttcccaccatttttctatgcctttatatttaaagtatgtttctggtagacagcatatagttggatactgctttttcattcaatcatagaatctctgtcgtttaactggtatatttagaccatttacatttgatatttttaaatatatagttagattaaaatctccaccttgttaactctatcctaattgttctgttctttagtttttgttctatttttgccttctatgatctaaatgaccatttttaataattctattttatattattgtttacatctcattgaacattttcagttgttacttctttaattggaatatacattcaaataatacacaacttaacatgttagtattttatatattcccattttctccgacatccattatgcttatcatattttactttcatatgctgtttacatggtacatttttactctaagacagccagttactttttaagataagtttttaaagttattaccttcatgtattccatttccgcatctcttcatttctttatgtatctccaaatgtctgctgtgtttcatattccttctgtttgaagaacttttcttgtagagtaggtcttctcttaatgtattattttctcagttttgtttctctgagagtatttctctatcagtttgaaagattttcatgagcatttcatgaagacagattttttccttcagctcttaaaagatgccattacattgtcctctggcctgcaatacttctgataagtctgctgtaattttcttaactttgttcttctatatgtaattttttcccctctctagcttgcttcaagattattttcagtagtttgaacataatatggctggggtggtgtgtgtttgtgtgtgtgtgtgagtgattttaatatttaccttccttgaggttctctgagcttcatagatttgtgttttctgggttcataaattttggaaacatattggccattatgtcttcaaatatttcttctgtcccatttattctgtatcttctgggattccaattatgtgtatgtgttggaccaatggatattttctcagagctcttggattctctgttccttcttgtcctaccctaccccacttatgtttcagtttgagtaacttttattgtcctaacgtcaagttcatttactttttccttgactatgtcaagtatattgatgagcctgttgaagacaattgttcatgtgcttattgagttttttcatttctagtatttccattttattctttttgttattgtttgagactgagtctcgctctgtctcccaggctggagtgcagtggcgtgatctcagctcactgcaagctccgcctcccgggttcccgctattctcctgcctcagcctcccgagtagctgggactacaggtgcccaccaccacgcctggctacttttttttgtattttttagtagagacggggtttcaccgtgttagccaggatggtctcgatctcctgagctcgtgatccgcccaccttggcctcccaaggtgctgggattacaggcgtgagccaccacgcccagccccattttatttttatagtttttgtgtctctgctcaaattatccatctaatcttgcctgttgtgcattttccattataactcttaagatactactcatagttcctttaaattccatgtcagtccaacagctatgtatttctgagtctagttctgatgaattttgtttcttggtggggtaaggtgttcatttttgcatttttgtatgccttgcattttttttttcctgaaagccaagtatcttctgtagaacaatagatatgaaggtaaatggatttaattcctggaaagggcatgtctttctatgtagcctttagtgtgtgggaggtggatgggtaagatttttataattatagctaggaattgaggaaggtttatggtttgttgttgctgtggttataagttcaccataggtttcagatatgaatagtgattccttatctttagggtccgaactggttttcccaagggtctatctcaatgtcagggtgatcttcaggtttaggtcccattggattatgcttcagatagcccatctatactaatatattttcattcattcaaatacttattgagtgctaaccattgaattatgtgtcattgtactaaacgctggaacttgtaactccccaaatactttattattgtttgccattattttatccatctgtaattttctctttagctttccaacttttgtgtgcctagcaaattcacattcttcctttaatattatctgcaaaaacaatccctgtccccatacctccatcaccatgaagtttatcatcctcttctccgtactacctatgcaccttatacagaattccatattttattacctgaattccctggtaaactgtaagtgtctgctggcaagaacagtgtcttattagtttacatatccacaggatttagcagtgattggtccagggtgtttacatgcacaacaaatgtgcagcgaaaatatttgctaatgaaagctggaaatctataggcatctattaaaagcaaaatactgtaataatgggctctcttacaacagtctaggagtaaagcaaaacatttttcttgccagttaagttttcaggactttaaaaaaacacaaagttgatttccttcttagtttggatatattttttaaattcatgtaatgcaaaataatttaaataataaatgattcggcctattaggatataattgagttccaagcagttgggaggacacatgaacccaaagttactttacctttattgcactttcacaaatgcctttaagagcttaagaataggagagaatagacaaaactagatgaaatgagaatttttgactgggccagaaataaagcagtgaggatatgcaattctcacaagtaattccaagttaagtttaactgtatcatgtattgccattctaatgctctcttgaaatccccaagaggagcaagaaatgcaataggcaatgagataagcctgaggaaattaggtgactgtgggcagggcattctcttgcttctccctagtcttcaggtgtgtcacaattcatttgggactgacatgtatttgtatggcagattggcagaggaattaacaagctagagggtgtgtgtagaaaagagggggaaaaaagacctgcctctccatgagttacctctgtgctgtttgctcacccatttgctccaaggggtggatttttatgcttgctttacaaatacgaaagaacaagtttaaatgggaagttagttgtactatcctgtatgcatgctcacccctcacaatttggattgttgttttatcaattgtggtcaaagttaggatgacctaacccatatacattccacacattccacaaagtcatcttaaacttaaggtattctcaaaaataacttttacagaaggaaaacttaaacagaagagcccaactgtgtatgatccaattacaaaaaagttatctgattttatttcttatatatttggcacaaacagcagagactgaaagctactacacatgttgaactgctgacaggaaaagaacccagtagataaatctaggctttccactccatatattagctggggctgccataacaaaacatcatagactgggtggcttaaacaacaatttacttctcacagttctgaagtctggaagtctgagaacaggtcgccagcatggttaggttctcgtagggttctcttcctgttctgtagacagctggcttcttcctgcatcctcacatggtgcagagagcaagcaggctttctgatgtctttttgagacgtagtctcgctctgtcgcccagggtggagtacagtggcgtgatcctggctcactgcaacctccgcctcctgggttcaagcgattcttctccttcagcctcccgagtagctgggactacaggcacatgccactgtgcctggctaattttttgtattttttttcagtggagacggggtttcaccgtgttagccaggattgtctcaatctcctgacctcatgatccactcgccttggcctcccaaagtgctgggattacaggcatgagccaccgggctcagcctgatgtctcttcttataaaggcactaatcccatcacgagggctccaccctcatgacctcatctaatcctaattgcctcccaaatgcctcatttccaagtaacatcacattgatggtgaggattttaacataattagttttgggagggacataaacattcagtccataacaactcatattacaccacttattgcataccagtattgttacatgaaaataccaatgtttactcatataaatatagatgatttatttccaaataaaacaatactgatttctcctggctctgaaatcctcattcttcactatatcttggttcttttactgatagcttgtctcagccaagttagacgttcacaccatgaagatcatatatcctcatatccgtggagatggtaaagtaaggtttctactgttacacaccattatgagtgacaactttatctacctaaagactcacttttctttattctcacccacaagtttgtcagctgaaagtggcaccctgttttgccgagaagttccttatatttgataattctagatctgagaaacagactcaaattcttttttctgtgaccttaaatcaggctcagagccctataatggacttcacaattctattttgttgtatgtgaccaataaattatctttaaaactatgctggaagtaaaatatcggtaattttttttttttttgacacagagtcttgctctgttgcccagactggagtgcagtggtgcaatctctgctcggtgcaacccccacctcctgggttcaagcgattctcctgcctcagcctctccagtagctgagattacaggtgcgcaccaccacgcccagctaattttgtattttttagtagagacagggtttcaccgtggtctcaaactcttgacctcgtgatccgcctgtctcagcctcccaaagtgctggggttacaggtgtaagccactgcgcccagccagtaattcttatcaaatgaaaaatgatcttcattcacaatgactgaccaaacttctgagtttccttcagttaatttcaaatcctgaggtcaaaatcaccaatgacttttgctctttggctttcaaagtgggacatatcatcaaatggtcccatatacacaaaatttacattatagacaaatacatatttgccatatgtttgatagcctcattcgttgattttatagatttaaaacaaccttaggctttttcttcagaatgtgtattctgatgtcgaatcagggatgaactccgactatatgccttcccacatttactacattcatagggtttctctgaagaatgacttctctgatgtcgaataaggtctgagccactgctaaatgccttcccacattcattacattcatagggtttctctccagtatgacttctttcatgtagaataagagatgtgcgctgactaaaggccttaccacatgttttgcatgtatatggcttctctccagtgtgaattctttcatgttgggcgaggtgtgcactctggctgaaggccttcccacactgatcacattcatagggtctatcttcagtatgaattctcttatgtcgtgtgagagatattcggtggctgaaggcttttccacattcctcacactggtagggtttttctccagtatgaattctttgatgttcaataagaaatgattggcggccgaaaactttactacatttattgcatttgaaaggtttctcttcagaatgaatattctgatgtattttaaggtttgcagttccagaaaacatcttcccacattccttacactcaaatagtttctttttctttgtatgaactttctgatgttgaataagggatgaatgccgattgcagaccttctcacatttattgcatctgtatagtttttctccattatgaattcttagatgcagaataagggttgaaagccgcctgaagaacttgtcacatttatcacatttgtacggtttctctgaagtgtgaattctctggtgaagcatcaggggtgaaatcctattaaataatttcccacattttctgcatttaaaaggattctctaaatggtgacttctttgctgtagactctgacttaaggccttcgcattttcagggattttctctccagcatgaattcttttatgtacaacaaagactgatttctttttgaagcctctcccacatttattatatttatgtgttttctttccattgtgaattttcttatgaagtaaaagggatgacatctgattgaaggcttttccgcactttctgcactggcagacattcccaacaacatgaattttctgatgtatattgaaagactgacattgactcaaggccttcccacagtcaagaatttcctttccatcatgaattctcatatgtagaataagggttgttctttgattgaagctttccccacatttattgcattcatggcttttctttccactgtgaattctctgatgaagtaggatggatgagatctgtctgaaagcttttctacaattactgcattcaaaaggcttctctcctgtatgaatgttctgatgaagtttaagagagaagcttcgactaaaggttttaccacagtcattacattttaaaggtttcttccctgaatgccctttcttaggttttactaggactgaatttttgttgcagccactctttcgtgtaggagctttttgttgtgcagaaactagtttctggcagatgctttgcccagatttgttgcattgatttggaggtaacttcttggtctcacatttagaccccgagtctgaaagacataaaggaattaaatgtttctccttttccatgctgaaaaaatgaagattctacaatataaatgtaattatcattattaatcacaacaacaattatgattaccaaaacataactttttagtgttttattgtggttttgatgactatactaaaggctttacagagatatttaataaccagagttcagaagagtgtaatttgaaaatgaataagattttatttatacgataacttttatgccatatacggcacattgaactccacaggttgttcaatggataaatgtatgtttattagagaatgtgtccagaaaaggtaagtctacagagacagaagataagtggttgcctggggctcaaggtaggaatggggattaactgaaaatggacatgaagaatcttacaggggtgataaaaatgttctaatactggatcatattgatggttacacactctgtaaatttatccaaaatcatttaattatattctagatatagtgacttttatgatgtttacctcaataaagttgtagattttaaaaaatgtattcttaagatcaaatttaaaaagaactagtaaaaattagaattgagtacagtcacgggttgcttaacaatgggaacatgttgtaagacatgcattgtcaggcaatttcatcattgtgcaaacatcttacagtagatttacataaacctagatagtatagcctactatacacctatgttatattgtatagcctgttcctaggctacaaacctgtacatgacgttactgtattgaatcctgtaggcaattttaacactatgataagtatttatgtatctaaatatacataaatgtagaaaaggtacagtacaaataacagttttatgatcttatagaaccatggccatatatgtagtctgttgttgactggactgaaacatcattatgcagcatatgactgtatttagatatttacaaaggtgaagtctttagcaagaagcaggaaaagctcagaaaaataggtaagagattagactaaaagaaggaatctattttgtagtaaaatagatcaatatggctggcatagggtgccaaagtccaaggtgatataaaataactacttgtatggcaaactgactataaacctgagtgaatgtggcatgataaacacaggctttagaactatgctatccaatatagtagccattagtcacctgtagctactgaggaattgaaatgtggctggtttgaggtatactatgagtataaaacatatgccagactgtgaaaatttactacaaaaaagtataaagtatctcattgtaaaaatgctggttatatgatataatatgttggatatattaggttaaatacatatattactaaaattaattttacctgtttgtattaggaagttcctatattgctataaataaatacttgagtgggtaatttataaacaaaagaggttcaattggctcctggttcagtaggctgtacaagcatggtgctggcacctccttggcttctggggaggcctcagtgagctcttactcatggtgaaagacgaagtaggagaaggcacatcacatggtgaaacaaggagagagagtgtggaggaggtgccacatattacaacgatcagattttgtaagaatcactccctattgctaagacaccaccaagggaatggtgctaagccattcatgagaaacccacccccatgatccaatcacctcccacagaccccacctccaacactgaggatgaaatttcaacatgagatttggtgagaaatccacccccatgatccaatcacctcccaccagaccccacctccaacactgaggattaatttcaacatgagatttggtgagaaacccacccccatgatccaatcacctcccacagaccccacctccaacactgaggatgaaatttcaacatgagatttggtgagaaatccacccccatgatccaatcacctcccacagaccccacctccaacactgaggattaaatttcaacatgagatttggtgagaaatccacccccatgatccaatcacctcccacagaccccacctccaacactgaggattaaatttcaacatgagatttggtgagaaacccacccccatgatccaatcacctcccacagaccccacctccaacactgaggattaaatttcaacatgagatttggtgagaaatccacccccatgatccaatcacctcccacagaccccacctccaacactgaggattaaatttcaacatgagatttggtgagaaatccacccccatgatccaatcacctcccacagaccccacctccaacactgaggattaaatttcaacatgagatttggtgagaaacccacccccatgatccaatcacctcccacagaccccacctccaacactgagtattaaatttcaacatgagatttggtgagaaatccacccccatgatccaatcacctcccacagaccccacctccaacactgaggattaaatttcaacatgagatttggtgagaaatccacccccatgatccaatcacctcccaccaggccccacctccaacactgaggattaaatttcaacatgagatttggtgagaaatccacccccatgatccaatcacctcccaccagaccccacctccaacactgaggattaaatttcaacatgagatttggtgagaaatccacccccatgatccaatcacctcccacagaccccacctccaacactgaggattaaatttcaacatgagatttggtgagaaatccacccccatgatccaatcacctcccaccaggccccacctccaacactgaggattaaatttcaacatgagatttggtgagaaatccacccccatgatccaatcacctcccaccaggccccacctccaacactgaggattaaatttcaacatgagatttggtgagaaatccacccccatgatccaatcacctcccaccagaccccacctccaacactgaggattaaatttcaacatgagatttggtgagaaatccacccccatgatccaatcacctcccaccagaccccacctccaacactgaggattaaatttcaacatgagatttggtgagaaatccacccccatgatccaatcacctcccacagaccccacctccaacactgaggattaaatttcaacatgagatttggtgagaaatccacccccatgatccaatcacctcccacagaccccacctccaacactgaggattaaatttcaacatgagatttggtggggacacagatccaaaccatatcactggttttagatttttatttgaatgtggatactaaagattttttcagtacatatgtggctcacattatatttctatttcataggtgtgctttaaaggcagacattactgaattaactgaggtgtttttcatttaactgcataatcttgtgacacacttgttaactctattaccataagcatattatcttgaaaatatagataataatcacgtacctcacaaggttttcatgagaattagaaataatgtgcgagatttctggcacatgctatgacctctaatctgccattccagtattcaaaaagctgagaaccaaagtcttctttccttttttcttttcctttttgaatacatatttggagtgaaaccccatctgaaatgcaatgaggctattcatagcctccatttattgctcttaggaagtctagtctttgcagctatctcaatgtgtttgattttggggtactgctccagcccctgctgggtatgttatgccacacatagtatatgacctgttcacctttctaaaatctgcaccattctgaattctg
